United States Patent Application Publication US 2010/0105134 A1 - sequence listing, part 7

SEQ ID NO: 147899 - RNA, 10 nt, Artificial Sequence
  Description of Artificial Sequence: Synthetic oligonucleotide
cugcggguuu

SEQ ID NO: 147900 - RNA, 9 nt, Artificial Sequence
  Description of Artificial Sequence: Synthetic oligonucleotide
uccaguuug

SEQ ID NO: 147901 - RNA, 12 nt, Artificial Sequence
  Description of Artificial Sequence: Synthetic oligonucleotide
uuaaggacuucu

SEQ ID NO: 147902 - RNA, 12 nt, Artificial Sequence
  Description of Artificial Sequence: Synthetic oligonucleotide
agugggacagag

SEQ ID NO: 147903 - RNA, 13 nt, Artificial Sequence
  Description of Artificial Sequence: Synthetic oligonucleotide
auuuguuauugug

SEQ ID NO: 147904 - RNA, 12 nt, Artificial Sequence
  Description of Artificial Sequence: Synthetic oligonucleotide
ucaaaugcauuu

SEQ ID NO: 147905 - RNA, 9 nt, Artificial Sequence
  Description of Artificial Sequence: Synthetic oligonucleotide
aggaaagcc

SEQ ID NO: 147906 - RNA, 10 nt, Artificial Sequence
  Description of Artificial Sequence: Synthetic oligonucleotide
ggaaagcccu

SEQ ID NO: 147907 - RNA, 11 nt, Artificial Sequence
  Description of Artificial Sequence: Synthetic oligonucleotide
ccagcauggcc

SEQ ID NO: 147908 - RNA, 10 nt, Artificial Sequence
  Description of Artificial Sequence: Synthetic oligonucleotide
uucucccuga

SEQ ID NO: 147909 - RNA, 11 nt, Artificial Sequence
  Description of Artificial Sequence: Synthetic oligonucleotide
aagaagcccuu

SEQ ID NO: 147910 - RNA, 11 nt, Artificial Sequence
  Description of Artificial Sequence: Synthetic oligonucleotide
gaagcccuuca

SEQ ID NO: 147911 - RNA, 10 nt, Artificial Sequence
  Description of Artificial Sequence: Synthetic oligonucleotide
cccuucagcg

SEQ ID NO: 147912 - RNA, 10 nt, Artificial Sequence
  Description of Artificial Sequence: Synthetic oligonucleotide
cuucagcggc

SEQ ID NO: 147913 - RNA, 11 nt, Artificial Sequence
  Description of Artificial Sequence: Synthetic oligonucleotide
cagcggccagu

SEQ ID NO: 147914 - RNA, 11 nt, Artificial Sequence
  Description of Artificial Sequence: Synthetic oligonucleotide
gaaaagcuccg

SEQ ID NO: 147915 - RNA, 10 nt, Artificial Sequence
  Description of Artificial Sequence: Synthetic oligonucleotide
aaagcuccgg

SEQ ID NO: 147916 - RNA, 12 nt, Artificial Sequence
  Description of Artificial Sequence: Synthetic oligonucleotide
gucaacagucug

SEQ ID NO: 147917 - RNA, 12 nt, Artificial Sequence
  Description of Artificial Sequence: Synthetic oligonucleotide
agaguucaaaag

SEQ ID NO: 147918 - RNA, 12 nt, Artificial Sequence
  Description of Artificial Sequence: Synthetic oligonucleotide
gaguucaaaagc

SEQ ID NO: 147919 - RNA, 11 nt, Artificial Sequence
  Description of Artificial Sequence: Synthetic oligonucleotide
ucaaaagcccu

SEQ ID NO: 147920 - RNA, 11 nt, Artificial Sequence
  Description of Artificial Sequence: Synthetic oligonucleotide
caaaagcccuu

SEQ ID NO: 147921 - RNA, 11 nt, Artificial Sequence
  Description of Artificial Sequence: Synthetic oligonucleotide
aaagcccuuca

SEQ ID NO: 147922 - RNA, 11 nt, Artificial Sequence
  Description of Artificial Sequence: Synthetic oligonucleotide
aagcccuucag

SEQ ID NO: 147923 - RNA, 12 nt, Artificial Sequence
  Description of Artificial Sequence: Synthetic oligonucleotide
ugaagccgcucg

SEQ ID NO: 147924 - RNA, 11 nt, Artificial Sequence
  Description of Artificial Sequence: Synthetic oligonucleotide
acgccagucaa

SEQ ID NO: 147925 - RNA, 12 nt, Artificial Sequence
  Description of Artificial Sequence: Synthetic oligonucleotide
ucuuggugcgug

SEQ ID NO: 147926 - RNA, 13 nt, Artificial Sequence
  Description of Artificial Sequence: Synthetic oligonucleotide
uuggauucaucag

SEQ ID NO: 147927 - RNA, 12 nt, Artificial Sequence
  Description of Artificial Sequence: Synthetic oligonucleotide
ggaauaccuaag

SEQ ID NO: 147928 - RNA, 11 nt, Artificial Sequence
  Description of Artificial Sequence: Synthetic oligonucleotide
uuugaggcuca

SEQ ID NO: 147929 - RNA, 10 nt, Artificial Sequence
  Description of Artificial Sequence: Synthetic oligonucleotide
cuacaauugg

SEQ ID NO: 147930 - RNA, 11 nt, Artificial Sequence
  Description of Artificial Sequence: Synthetic oligonucleotide
aguuaggagcc

SEQ ID NO: 147931 - RNA, 12 nt, Artificial Sequence
  Description of Artificial Sequence: Synthetic oligonucleotide
gucaauauccac

SEQ ID NO: 147932 - RNA, 12 nt, Artificial Sequence
  Description of Artificial Sequence: Synthetic oligonucleotide
uguucagucaca

SEQ ID NO: 147933 - RNA, 11 nt, Artificial Sequence
  Description of Artificial Sequence: Synthetic oligonucleotide
cacacacauac

SEQ ID NO: 147934 - RNA, 11 nt, Artificial Sequence
  Description of Artificial Sequence: Synthetic oligonucleotide
uccuuuugcuu

SEQ ID NO: 147935 - RNA, 15 nt, Artificial Sequence
  Description of Artificial Sequence: Synthetic oligonucleotide
uuuaaaguaauuuuu

SEQ ID NO: 147936 - RNA, 12 nt, Artificial Sequence
  Description of Artificial Sequence: Synthetic oligonucleotide
aacagucaaugg

SEQ ID NO: 147937 - RNA, 12 nt, Artificial Sequence
  Description of Artificial Sequence: Synthetic oligonucleotide
cgacaaaccaau

SEQ ID NO: 147938 - RNA, 11 nt, Artificial Sequence
  Description of Artificial Sequence: Synthetic oligonucleotide
cugcuaccacu

SEQ ID NO: 147939 - RNA, 12 nt, Artificial Sequence
  Description of Artificial Sequence: Synthetic oligonucleotide
caagcggucuua

SEQ ID NO: 147940 - RNA, 12 nt, Artificial Sequence
  Description of Artificial Sequence: Synthetic oligonucleotide
gucuuaccggcu

SEQ ID NO: 147941 - RNA, 10 nt, Artificial Sequence
  Description of Artificial Sequence: Synthetic oligonucleotide
auggguuacc

SEQ ID NO: 147942 - RNA, 10 nt, Artificial Sequence
  Description of Artificial Sequence: Synthetic oligonucleotide
uuaccugcga

SEQ ID NO: 147943 - RNA, 11 nt, Artificial Sequence
  Description of Artificial Sequence: Synthetic oligonucleotide
aucuugcugag

SEQ ID NO: 147944 - RNA, 12 nt, Artificial Sequence
  Description of Artificial Sequence: Synthetic oligonucleotide
gcauaaaacagu

SEQ ID NO: 147945 - RNA, 11 nt, Artificial Sequence
  Description of Artificial Sequence: Synthetic oligonucleotide
uccuuuauccu

SEQ ID NO: 147946 - RNA, 11 nt, Artificial Sequence
  Description of Artificial Sequence: Synthetic oligonucleotide
aacgcaaguug

SEQ ID NO: 147947 - RNA, 12 nt, Artificial Sequence
  Description of Artificial Sequence: Synthetic oligonucleotide
aacugaaaccau

SEQ ID NO: 147948 - RNA, 13 nt, Artificial Sequence
  Description of Artificial Sequence: Synthetic oligonucleotide
cuuuguuaaauau

SEQ ID NO: 147949 - RNA, 13 nt, Artificial Sequence
  Description of Artificial Sequence: Synthetic oligonucleotide
uauauuaaaaguu

SEQ ID NO: 147950 - RNA, 12 nt, Artificial Sequence
  Description of Artificial Sequence: Synthetic oligonucleotide
uuuugacuuaac

SEQ ID NO: 147951 - RNA, 12 nt, Artificial Sequence
  Description of Artificial Sequence: Synthetic oligonucleotide
caaacucagcac

SEQ ID NO: 147952 - RNA, 10 nt, Artificial Sequence
  Description of Artificial Sequence: Synthetic oligonucleotide
gcugaccuca

SEQ ID NO: 147953 - RNA, 13 nt, Artificial Sequence
  Description of Artificial Sequence: Synthetic oligonucleotide
uuauucagaucgc

SEQ ID NO: 147954 - RNA, 12 nt, Artificial Sequence
  Description of Artificial Sequence: Synthetic oligonucleotide
ggguucugggau

SEQ ID NO: 147955 - RNA, 14 nt, Artificial Sequence
  Description of Artificial Sequence: Synthetic oligonucleotide
uauuggaaauuaug

SEQ ID NO: 147956 - RNA, 12 nt, Artificial Sequence
  Description of Artificial Sequence: Synthetic oligonucleotide
uggaagcacuag

SEQ ID NO: 147957 - RNA, 12 nt, Artificial Sequence
  Description of Artificial Sequence: Synthetic oligonucleotide
uuuuuaugugga

SEQ ID NO: 147958 - RNA, 11 nt, Artificial Sequence
  Description of Artificial Sequence: Synthetic oligonucleotide
gaauugguaga

SEQ ID NO: 147959 - RNA, 12 nt, Artificial Sequence
  Description of Artificial Sequence: Synthetic oligonucleotide
uagacuuggaga

SEQ ID NO: 147960 - RNA, 12 nt, Artificial Sequence
  Description of Artificial Sequence: Synthetic oligonucleotide
uacaguauucca

SEQ ID NO: 147961 - RNA, 14 nt, Artificial Sequence
  Description of Artificial Sequence: Synthetic oligonucleotide
cacugaugaauuaa

SEQ ID NO: 147962 - RNA, 11 nt, Artificial Sequence
  Description of Artificial Sequence: Synthetic oligonucleotide
cacaucaucac

SEQ ID NO: 147963 - RNA, 12 nt, Artificial Sequence
  Description of Artificial Sequence: Synthetic oligonucleotide
ucaccaaacaga

SEQ ID NO: 147964 - RNA, 11 nt, Artificial Sequence
  Description of Artificial Sequence: Synthetic oligonucleotide
gaacaugaugg

SEQ ID NO: 147965 - RNA, 11 nt, Artificial Sequence
  Description of Artificial Sequence: Synthetic oligonucleotide
auguagacugc

SEQ ID NO: 147966 - RNA, 12 nt, Artificial Sequence
  Description of Artificial Sequence: Synthetic oligonucleotide
gaucuauuuaug

SEQ ID NO: 147967 - RNA, 11 nt, Artificial Sequence
  Description of Artificial Sequence: Synthetic oligonucleotide
cacuauuauca

SEQ ID NO: 147968 - RNA, 10 nt, Artificial Sequence
  Description of Artificial Sequence: Synthetic oligonucleotide
ucaguucugc

SEQ ID NO: 147969 - RNA, 12 nt, Artificial Sequence
  Description of Artificial Sequence: Synthetic oligonucleotide
gauuaaaccuac

SEQ ID NO: 147970 - RNA, 12 nt, Artificial Sequence
  Description of Artificial Sequence: Synthetic oligonucleotide
uaaaauccuucu

SEQ ID NO: 147971 - RNA, 11 nt, Artificial Sequence
  Description of Artificial Sequence: Synthetic oligonucleotide
augcuguagac

SEQ ID NO: 147972 - RNA, 12 nt, Artificial Sequence
  Description of Artificial Sequence: Synthetic oligonucleotide
ugauaggaauag

SEQ ID NO: 147973 - RNA, 10 nt, Artificial Sequence
  Description of Artificial Sequence: Synthetic oligonucleotide
auggcccuga

SEQ ID NO: 147974 - RNA, 10 nt, Artificial Sequence
  Description of Artificial Sequence: Synthetic oligonucleotide
uccucaagca

SEQ ID NO: 147975 - RNA, 9 nt, Artificial Sequence
  Description of Artificial Sequence: Synthetic oligonucleotide
uucagccca

SEQ ID NO: 147976 - RNA, 10 nt, Artificial Sequence
  Description of Artificial Sequence: Synthetic oligonucleotide
cugcugaacc

SEQ ID NO: 147977 - RNA, 11 nt, Artificial Sequence
  Description of Artificial Sequence: Synthetic oligonucleotide
aguucucuuca

SEQ ID NO: 147978 - RNA, 10 nt, Artificial Sequence
  Description of Artificial Sequence: Synthetic oligonucleotide
cagccuagag

SEQ ID NO: 147979 - RNA, 12 nt, Artificial Sequence
  Description of Artificial Sequence: Synthetic oligonucleotide
ucugugaagugu

SEQ ID NO: 147980 - RNA, 13 nt, Artificial Sequence
  Description of Artificial Sequence: Synthetic oligonucleotide
gagaaaauuucaa

SEQ ID NO: 147981 - RNA, 10 nt, Artificial Sequence
  Description of Artificial Sequence: Synthetic oligonucleotide
auccuccuga

SEQ ID NO: 147982 - RNA, 11 nt, Artificial Sequence
  Description of Artificial Sequence: Synthetic oligonucleotide
ugacaucauau

SEQ ID NO: 147983 - RNA, 12 nt, Artificial Sequence
  Description of Artificial Sequence: Synthetic oligonucleotide
aucuucaucaua

SEQ ID NO: 147984 - RNA, 12 nt, Artificial Sequence
  Description of Artificial Sequence: Synthetic oligonucleotide
acuagcuauuaa

SEQ ID NO: 147985 - RNA, 13 nt, Artificial Sequence
  Description of Artificial Sequence: Synthetic oligonucleotide
cucuacuaaaaau

SEQ ID NO: 147986 - RNA, 11 nt, Artificial Sequence
  Description of Artificial Sequence: Synthetic oligonucleotide
cuaucucgccu

SEQ ID NO: 147987 - RNA, 12 nt, Artificial Sequence
  Description of Artificial Sequence: Synthetic oligonucleotide
uucgguccaguu

SEQ ID NO: 147988 - RNA, 10 nt, Artificial Sequence
  Description of Artificial Sequence: Synthetic oligonucleotide
auguagccgc

SEQ ID NO: 147989 - RNA, 11 nt, Artificial Sequence
  Description of Artificial Sequence: Synthetic oligonucleotide
gaggagacuug

SEQ ID NO: 147990 - RNA, 11 nt, Artificial Sequence
  Description of Artificial Sequence: Synthetic oligonucleotide
aguagugagga

SEQ ID NO: 147991 - RNA, 13 nt, Artificial Sequence
  Description of Artificial Sequence: Synthetic oligonucleotide
agaugaguacaaa

SEQ ID NO: 147992 - RNA, 12 nt, Artificial Sequence
  Description of Artificial Sequence: Synthetic oligonucleotide
uuguuaaugggc

SEQ ID NO: 147993 - RNA, 12 nt, Artificial Sequence
  Description of Artificial Sequence: Synthetic oligonucleotide
uuuuaauuuauu

SEQ ID NO: 147994 - RNA, 11 nt, Artificial Sequence
  Description of Artificial Sequence: Synthetic oligonucleotide
auuuaaauaug

SEQ ID NO: 147995 - RNA, 12 nt, Artificial Sequence
  Description of Artificial Sequence: Synthetic oligonucleotide
auccuuuguuuc

SEQ ID NO: 147996 - RNA, 13 nt, Artificial Sequence
  Description of Artificial Sequence: Synthetic oligonucleotide
gucuaaguguuug

SEQ ID NO: 147997 - RNA, 11 nt, Artificial Sequence
  Description of Artificial Sequence: Synthetic oligonucleotide
ccugugacaaa

SEQ ID NO: 147998 - RNA, 12 nt, Artificial Sequence
  Description of Artificial Sequence: Synthetic oligonucleotide
caggcugaauua

SEQ ID NO: 147999 - RNA, 13 nt, Artificial Sequence
  Description of Artificial Sequence: Synthetic oligonucleotide
ucauucuuacaau

SEQ ID NO: 148000 - RNA, 14 nt, Artificial Sequence
  Description of Artificial Sequence: Synthetic oligonucleotide
cauucuuacaauug

SEQ ID NO: 148001 - RNA, 11 nt, Artificial Sequence
  Description of Artificial Sequence: Synthetic oligonucleotide
agagaguguac

SEQ ID NO: 148002 - RNA, 11 nt, Artificial Sequence
  Description of Artificial Sequence: Synthetic oligonucleotide
gaacucagcag

SEQ ID NO: 148003 - RNA, 12 nt, Artificial Sequence
  Description of Artificial Sequence: Synthetic oligonucleotide
uuauuuucagua

SEQ ID NO: 148004 - RNA, 11 nt, Artificial Sequence
  Description of Artificial Sequence: Synthetic oligonucleotide
cuuaaauggaa

SEQ ID NO: 148005 - RNA, 12 nt, Artificial Sequence
  Description of Artificial Sequence: Synthetic oligonucleotide
gccuaaaauugu

SEQ ID NO: 148006 - RNA, 12 nt, Artificial Sequence
  Description of Artificial Sequence: Synthetic oligonucleotide
acuaacaucugg

SEQ ID NO: 148007 - RNA, 11 nt, Artificial Sequence
  Description of Artificial Sequence: Synthetic oligonucleotide
gacugugagcu

SEQ ID NO: 148008 - RNA, 13 nt, Artificial Sequence
  Description of Artificial Sequence: Synthetic oligonucleotide
gcuuuuuauuaau

SEQ ID NO: 148009 - RNA, 12 nt, Artificial Sequence
  Description of Artificial Sequence: Synthetic oligonucleotide
ucuucuuacauu

SEQ ID NO: 148010 - RNA, 14 nt, Artificial Sequence
  Description of Artificial Sequence: Synthetic oligonucleotide
auuuguaaaaaugu

SEQ ID NO: 148011 - RNA, 14 nt, Artificial Sequence
  Description of Artificial Sequence: Synthetic oligonucleotide
ucuuaauucauauu

SEQ ID NO: 148012 - RNA, 12 nt, Artificial Sequence
  Description of Artificial Sequence: Synthetic oligonucleotide
aacuaaucauga

SEQ ID NO: 148013 - RNA, 11 nt, Artificial Sequence
  Description of Artificial Sequence: Synthetic oligonucleotide
cugcucuuggg

SEQ ID NO: 148014 - RNA, 12 nt, Artificial Sequence
  Description of Artificial Sequence: Synthetic oligonucleotide
aguagcuuugag

SEQ ID NO: 148015 - RNA, 13 nt, Artificial Sequence
  Description of Artificial Sequence: Synthetic oligonucleotide
acguaauauuuca

SEQ ID NO: 148016 - RNA, 12 nt, Artificial Sequence
  Description of Artificial Sequence: Synthetic oligonucleotide
auucucuucacu

SEQ ID NO: 148017 - RNA, 13 nt, Artificial Sequence
  Description of Artificial Sequence: Synthetic oligonucleotide
uaaugcuaagaaa

SEQ ID NO: 148018 - RNA, 11 nt, Artificial Sequence
  Description of Artificial Sequence: Synthetic oligonucleotide
cugaaaaucaa

SEQ ID NO: 148019 - RNA, 13 nt, Artificial Sequence
  Description of Artificial Sequence: Synthetic oligonucleotide
auaugauuacuuu

SEQ ID NO: 148020 - RNA, 13 nt, Artificial Sequence
  Description of Artificial Sequence: Synthetic oligonucleotide
auuuuguucuaca

SEQ ID NO: 148021 - RNA, 11 nt, Artificial Sequence
  Description of Artificial Sequence: Synthetic oligonucleotide
ccgggacucuc

SEQ ID NO: 148022 - RNA, 13 nt, Artificial Sequence
  Description of Artificial Sequence: Synthetic oligonucleotide
cuuuaaaguaaag

SEQ ID NO: 148023 - RNA, 12 nt, Artificial Sequence
  Description of Artificial Sequence: Synthetic oligonucleotide
cuggaagccugg

SEQ ID NO: 148024 - RNA, 13 nt, Artificial Sequence
  Description of Artificial Sequence: Synthetic oligonucleotide
aaacaaaagagag

SEQ ID NO: 148025 - RNA, 12 nt, Artificial Sequence
  Description of Artificial Sequence: Synthetic oligonucleotide
ucaguuaugccg

SEQ ID NO: 148026 - RNA, 12 nt, Artificial Sequence
  Description of Artificial Sequence: Synthetic oligonucleotide
aaaagaagucca

SEQ ID NO: 148027 - RNA, 10 nt, Artificial Sequence
  Description of Artificial Sequence: Synthetic oligonucleotide
ggugagguua

SEQ ID NO: 148028 - RNA, 10 nt, Artificial Sequence
  Description of Artificial Sequence: Synthetic oligonucleotide
ggaagaggac

SEQ ID NO: 148029 - RNA, 12 nt, Artificial Sequence
  Description of Artificial Sequence: Synthetic oligonucleotide
agcaaguauugu

SEQ ID NO: 148030 - RNA, 11 nt, Artificial Sequence
  Description of Artificial Sequence: Synthetic oligonucleotide
uuguagcacuc

SEQ ID NO: 148031 - RNA, 13 nt, Artificial Sequence
  Description of Artificial Sequence: Synthetic oligonucleotide
caaaaccacaaau

SEQ ID NO: 148032 - RNA, 11 nt, Artificial Sequence
  Description of Artificial Sequence: Synthetic oligonucleotide
aagcccauaca

SEQ ID NO: 148033 - RNA, 10 nt, Artificial Sequence
  Description of Artificial Sequence: Synthetic oligonucleotide
gcccauacag

SEQ ID NO: 148034 - RNA, 11 nt, Artificial Sequence
  Description of Artificial Sequence: Synthetic oligonucleotide
agaaaccuucc

SEQ ID NO: 148035 - RNA, 9 nt, Artificial Sequence
  Description of Artificial Sequence: Synthetic oligonucleotide
uauaccuac

SEQ ID NO: 148036 - RNA, 12 nt, Artificial Sequence
  Description of Artificial Sequence: Synthetic oligonucleotide
ccaguuuucgga

SEQ ID NO: 148037 - RNA, 8 nt, Artificial Sequence
  Description of Artificial Sequence: Synthetic oligonucleotide
gaacaggg

SEQ ID NO: 148038 - RNA, 12 nt, Artificial Sequence
  Description of Artificial Sequence: Synthetic oligonucleotide
uaacuuuccagu

SEQ ID NO: 148039 - RNA, 13 nt, Artificial Sequence
  Description of Artificial Sequence: Synthetic oligonucleotide
aaguuugguuuug

SEQ ID NO: 148040 - RNA, 11 nt, Artificial Sequence
  Description of Artificial Sequence: Synthetic oligonucleotide
uucccacugua

SEQ ID NO: 148041 - RNA, 12 nt, Artificial Sequence
  Description of Artificial Sequence: Synthetic oligonucleotide
gauaccauauga

SEQ ID NO: 148042 - RNA, 10 nt, Artificial Sequence
  Description of Artificial Sequence: Synthetic oligonucleotide
acaugggcug

SEQ ID NO: 148043 - RNA, 12 nt, Artificial Sequence
  Description of Artificial Sequence: Synthetic oligonucleotide
aacuuuuucaua

SEQ ID NO: 148044 - RNA, 11 nt, Artificial Sequence
  Description of Artificial Sequence: Synthetic oligonucleotide
augaggccgga

SEQ ID NO: 148045 - RNA, 10 nt, Artificial Sequence
  Description of Artificial Sequence: Synthetic oligonucleotide
cugcauuugu

SEQ ID NO: 148046 - RNA, 12 nt, Artificial Sequence
  Description of Artificial Sequence: Synthetic oligonucleotide
auguuuacuacc

SEQ ID NO: 148047 - RNA, 14 nt, Artificial Sequence
  Description of Artificial Sequence: Synthetic oligonucleotide
auuuuuugaugaaa

SEQ ID NO: 148048 - RNA, 13 nt, Artificial Sequence
  Description of Artificial Sequence: Synthetic oligonucleotide
agugugugaauuu

SEQ ID NO: 148049 - RNA, 12 nt, Artificial Sequence
  Description of Artificial Sequence: Synthetic oligonucleotide
agcaauguaugu

SEQ ID NO: 148050 - RNA, 13 nt, Artificial Sequence
  Description of Artificial Sequence: Synthetic oligonucleotide
aagcacauauaua

SEQ ID NO: 148051 - RNA, 13 nt, Artificial Sequence
  Description of Artificial Sequence: Synthetic oligonucleotide
uaauaguuucucc

SEQ ID NO: 148052 - RNA, 12 nt, Artificial Sequence
  Description of Artificial Sequence: Synthetic oligonucleotide
guuucuccaaau

SEQ ID NO: 148053 - RNA, 12 nt, Artificial Sequence
  Description of Artificial Sequence: Synthetic oligonucleotide
acuuccuagaaa

SEQ ID NO: 148054 - RNA, 12 nt, Artificial Sequence
  Description of Artificial Sequence: Synthetic oligonucleotide
acaccauauaug

SEQ ID NO: 148055 - RNA, 13 nt, Artificial Sequence
  Description of Artificial Sequence: Synthetic oligonucleotide
uauaugaauggag

SEQ ID NO: 148056 - RNA, 12 nt, Artificial Sequence
  Description of Artificial Sequence: Synthetic oligonucleotide
cauuuacaggga

SEQ ID NO: 148057 - RNA, 12 nt, Artificial Sequence
  Description of Artificial Sequence: Synthetic oligonucleotide
auuuacagggac

SEQ ID NO: 148058 - RNA, 9 nt, Artificial Sequence
  Description of Artificial Sequence: Synthetic oligonucleotide
gggaccuga

SEQ ID NO: 148059 - RNA, 13 nt, Artificial Sequence
  Description of Artificial Sequence: Synthetic oligonucleotide
guuugacugcauc

SEQ ID NO: 148060 - RNA, 12 nt, Artificial Sequence
  Description of Artificial Sequence: Synthetic oligonucleotide
uugacugcaucg

SEQ ID NO: 148061 - RNA, 11 nt, Artificial Sequence
  Description of Artificial Sequence: Synthetic oligonucleotide
aguucacaggg

SEQ ID NO: 148062 - RNA, 12 nt, Artificial Sequence
  Description of Artificial Sequence: Synthetic oligonucleotide
gcaccucugucc

SEQ ID NO: 148063 - RNA, 14 nt, Artificial Sequence
  Description of Artificial Sequence: Synthetic oligonucleotide
guuugucuuuuuaa

SEQ ID NO: 148064 - RNA, 13 nt, Artificial Sequence
  Description of Artificial Sequence: Synthetic oligonucleotide
uugucuuuuuaag

SEQ ID NO: 148065 - RNA, 12 nt, Artificial Sequence
  Description of Artificial Sequence: Synthetic oligonucleotide
cuaaagguuguc

SEQ ID NO: 148066 - RNA, 11 nt, Artificial Sequence
  Description of Artificial Sequence: Synthetic oligonucleotide
agguugucgac

SEQ ID NO: 148067 - RNA, 12 nt, Artificial Sequence
  Description of Artificial Sequence: Synthetic oligonucleotide
ccuggcaauugu

SEQ ID NO: 148068 - RNA, 11 nt, Artificial Sequence
  Description of Artificial Sequence: Synthetic oligonucleotide
guggugcgagg

SEQ ID NO: 148069 - RNA, 12 nt, Artificial Sequence
  Description of Artificial Sequence: Synthetic oligonucleotide
gagacaugaaau

SEQ ID NO: 148070 - RNA, 12 nt, Artificial Sequence
  Description of Artificial Sequence: Synthetic oligonucleotide
uauauuucucca

SEQ ID NO: 148071 - RNA, 9 nt, Artificial Sequence
  Description of Artificial Sequence: Synthetic oligonucleotide
augaaggcu

SEQ ID NO: 148072 - RNA, 10 nt, Artificial Sequence
  Description of Artificial Sequence: Synthetic oligonucleotide
cuggaguggu

SEQ ID NO: 148073 - RNA, 10 nt, Artificial Sequence
  Description of Artificial Sequence: Synthetic oligonucleotide
ggaagagagg

SEQ ID NO: 148074 - RNA, 11 nt, Artificial Sequence
  Description of Artificial Sequence: Synthetic oligonucleotide
uugcaucgggc

SEQ ID NO: 148075 - RNA, 12 nt, Artificial Sequence
  Description of Artificial Sequence: Synthetic oligonucleotide
uauccuacugug

SEQ ID NO: 148076 - RNA, 12 nt, Artificial Sequence
  Description of Artificial Sequence: Synthetic oligonucleotide
ccuacuguguaa

SEQ ID NO: 148077 - RNA, 11 nt, Artificial Sequence
  Description of Artificial Sequence: Synthetic oligonucleotide
cuuguagugua

SEQ ID NO: 148078 - RNA, 12 nt, Artificial Sequence
  Description of Artificial Sequence: Synthetic oligonucleotide
cuuuguugauug

SEQ ID NO: 148079 - RNA, 13 nt, Artificial Sequence
  Description of Artificial Sequence: Synthetic oligonucleotide
uuguugauugaaa

SEQ ID NO: 148080 - RNA, 14 nt, Artificial Sequence
  Description of Artificial Sequence: Synthetic oligonucleotide
ucuuuuucuuccau

SEQ ID NO: 148081 - RNA, 12 nt, Artificial Sequence
  Description of Artificial Sequence: Synthetic oligonucleotide
aucuuccuucua

SEQ ID NO: 148082 - RNA, 12 nt, Artificial Sequence
  Description of Artificial Sequence: Synthetic oligonucleotide
ugaaugcuucau

SEQ ID NO: 148083 - RNA, 12 nt, Artificial Sequence
  Description of Artificial Sequence: Synthetic oligonucleotide
gaaugcuucaug

SEQ ID NO: 148084 - RNA, 12 nt, Artificial Sequence
  Description of Artificial Sequence: Synthetic oligonucleotide
auucuacuuuga

SEQ ID NO: 148085 - RNA, 12 nt, Artificial Sequence
  Description of Artificial Sequence: Synthetic oligonucleotide
gcaacuacagac

SEQ ID NO: 148086 - RNA, 12 nt, Artificial Sequence
  Description of Artificial Sequence: Synthetic oligonucleotide
accaaggucaac

SEQ ID NO: 148087 - RNA, 12 nt, Artificial Sequence
  Description of Artificial Sequence: Synthetic oligonucleotide
gacuaucucgac

SEQ ID NO: 148088 - RNA, 12 nt, Artificial Sequence
  Description of Artificial Sequence: Synthetic oligonucleotide
accuucccaaac

SEQ ID NO: 148089 - RNA, 13 nt, Artificial Sequence
  Description of Artificial Sequence: Synthetic oligonucleotide
caagcuuagaacu

SEQ ID NO: 148090 - RNA, 14 nt, Artificial Sequence
  Description of Artificial Sequence: Synthetic oligonucleotide
gcuuagaacuuuaa

SEQ ID NO: 148091 - RNA, 13 nt, Artificial Sequence
  Description of Artificial Sequence: Synthetic oligonucleotide
aacuuuaagcaac

SEQ ID NO: 148092 - RNA, 10 nt, Artificial Sequence
  Description of Artificial Sequence: Synthetic oligonucleotide
agaccaccac

SEQ ID NO: 148093 - RNA, 13 nt, Artificial Sequence
  Description of Artificial Sequence: Synthetic oligonucleotide
cgagaaauaaagu

SEQ ID NO: 148094 - RNA, 13 nt, Artificial Sequence
  Description of Artificial Sequence: Synthetic oligonucleotide
gagaaauaaaguu

SEQ ID NO: 148095 - RNA, 11 nt, Artificial Sequence
  Description of Artificial Sequence: Synthetic oligonucleotide
ggaaaugaucc

SEQ ID NO: 148096 - RNA, 12 nt, Artificial Sequence
  Description of Artificial Sequence: Synthetic oligonucleotide
aagaaaugaaac

SEQ ID NO: 148097 - RNA, 12 nt, Artificial Sequence
  Description of Artificial Sequence: Synthetic oligonucleotide
uuuccauccucc

SEQ ID NO: 148098 - RNA, 14 nt, Artificial Sequence
  Description of Artificial Sequence: Synthetic oligonucleotide
cugaaaaucuuuga

SEQ ID NO: 148099 - RNA, 10 nt, Artificial Sequence
  Description of Artificial Sequence: Synthetic oligonucleotide
gccguucagg

SEQ ID NO: 148100 - RNA, 12 nt, Artificial Sequence
  Description of Artificial Sequence: Synthetic oligonucleotide
aggguccagaag

SEQ ID NO: 148101 - RNA, 12 nt, Artificial Sequence
  Description of Artificial Sequence: Synthetic oligonucleotide
caagacugcuug

SEQ ID NO: 148102 - RNA, 12 nt, Artificial Sequence
  Description of Artificial Sequence: Synthetic oligonucleotide
ccaugucuuugg

SEQ ID NO: 148103 - RNA, 10 nt, Artificial Sequence
  Description of Artificial Sequence: Synthetic oligonucleotide
ccugaaacac

SEQ ID NO: 148104 - RNA, 11 nt, Artificial Sequence
  Description of Artificial Sequence: Synthetic oligonucleotide
cucuguaccuc

SEQ ID NO: 148105 - RNA, 11 nt, Artificial Sequence
  Description of Artificial Sequence: Synthetic oligonucleotide
gcaagacaaga

SEQ ID NO: 148106 - RNA, 12 nt, Artificial Sequence
  Description of Artificial Sequence: Synthetic oligonucleotide
caagacaagaaa

SEQ ID NO: 148107 - RNA, 11 nt, Artificial Sequence
  Description of Artificial Sequence: Synthetic oligonucleotide
guacaagaucc

SEQ ID NO: 148108 - RNA, 11 nt, Artificial Sequence
  Description of Artificial Sequence: Synthetic oligonucleotide
guacuugcaga

SEQ ID NO: 148109 - RNA, 12 nt, Artificial Sequence
  Description of Artificial Sequence: Synthetic oligonucleotide
gaucgauacaga

SEQ ID NO: 148110 - RNA, 12 nt, Artificial Sequence
  Description of Artificial Sequence: Synthetic oligonucleotide
auaaaaauaaau

SEQ ID NO: 148111 - RNA, 12 nt, Artificial Sequence
  Description of Artificial Sequence: Synthetic oligonucleotide
aaaaauaaauau

SEQ ID NO: 148112 - RNA, 12 nt, Artificial Sequence
  Description of Artificial Sequence: Synthetic oligonucleotide
uugacugcugug

SEQ ID NO: 148113 - RNA, 12 nt, Artificial Sequence
  Description of Artificial Sequence: Synthetic oligonucleotide
gagaugagagac

SEQ ID NO: 148114 - RNA, 9 nt, Artificial Sequence
  Description of Artificial Sequence: Synthetic oligonucleotide
cccacuugg

SEQ ID NO: 148115 - RNA, 2015 nt, Homo sapiens
cgccucaggucggccgcggacuacaaauggacgagagaggcggccguccauuaguuagcggcuccggagcaacgcagccguuguccuugaggccgacgggccugacgcgggcggguugaacgcgcuggugaggcggucacccgggcuacggcggccggcagggggcaguggcggccguugucuagggcccggagguggggccgcgcgccucgggcgcuacgaacccggcaggcccacgcuuggcugcggccgggugcgggcugaggccaugggcgaccgcggcagcucccggcgccggaggacagggucgcggcccucgagccacggcggcggcgggccugcggcggcggaagaggaggugcgggacgccgcugcgggccccgacgugggagccgcgggggacgcgccagccccggcccccaacaaggacggagacgccggcgugggcagcggccacugggagcugaggugccaucgccugcaggauucuuuauucagcucugacaguggcuucagcaacuaccguggcauccugaacugguguguggugaugcugaucuugagcaaugcccgguuauuucuggagaaccucaucaaguauggcauccugguggaccccauccaggugguuucucuguuccugaaggaucccuauagcuggcccgccccaugccugguuauugcggccaaugucuuugcuguggcugcauuccagguugagaagcgccuggcggugggugcccugacggagcaggcgggacugcugcugcacguggccaaccuggccaccauucuguguuucccagcggcuguggucuuacugguugagucuaucacuccagugggcucccugcuggcgcugauggcgcacaccauccucuuccucaagcucuucuccuaccgcgacgucaacucauggugccgcagggccagggccaaggcugccucugcagggaagaaggccagcagugcugcugccccgcacaccgugagcuacccggacaaucugaccuaccgcgaucucuacuacuuccucuucgcccccaccuugugcuacgagcucaacuuuccccgcucuccccgcauccggaagcgcuuucugcugcgacggauccuugagaugcuguucuucacccagcuccagguggggcugauccagcaguggaugguccccaccauccagaacuccaugaagcccuucaaggacauggacuacucacgcaucaucgagcgccuccugaagcuggcgguccccaaucaccucaucuggcucaucuucuucuacuggcucuuccacuccugccugaaugccguggcugagcucaugcaguuuggagaccgggaguucuaccgggacugguggaacuccgagucugucaccuacuucuggcagaacuggaacaucccugugcacaaguggugcaucagacacuucuacaagcccaugcuucgacggggcagcagcaaguggauggccaggacagggguguuccuggccucggccuucuuccacgaguaccuggugagcgucccucugcgaauguuccgccucugggcguucacgggcaugauggcucagaucccacuggccugguucgugggccgcuuuuuccagggcaacuauggcaacgcagcuguguggcugucgcucaucaucggacagccaauagccguccucauguacguccacgacuacuacgugcucaacuaugaggccccagcggcagaggccugagcugcaccugagggccuggcuucucacugccaccucacacccgcugccagagcccaccucuccuccuaggccucgagugcuggggaugggccuggcugcacagcauccuccucuggucccagggaggccucucugccccuauggggcucuguccugcaccccucagggauggcgacagcaggccagacacagucugaugccagcugggagucuugcugacccugccccggguccgagggugucaauaaagugcuguccagugaaaaaaaaaaaaaaaaaa

SEQ ID NO: 148116 - RNA, 19 nt, Artificial Sequence
  Description of Artificial Sequence: Synthetic oligonucleotide
cgccucaggucggccgcgg

SEQ ID NO: 148117 - RNA, 19 nt, Artificial Sequence
  Description of Artificial Sequence: Synthetic oligonucleotide
gacuacaaauggacgagag

SEQ ID NO: 148118 - RNA, 19 nt, Artificial Sequence
  Description of Artificial Sequence: Synthetic oligonucleotide
gaggcggccguccauuagu

SEQ ID NO: 148119 - RNA, 19 nt, Artificial Sequence
  Description of Artificial Sequence: Synthetic oligonucleotide
uuagcggcuccggagcaac

SEQ ID NO: 148120 - RNA, 19 nt, Artificial Sequence
  Description of Artificial Sequence: Synthetic oligonucleotide
cgcagccguuguccuugag

SEQ ID NO: 148121 - RNA, 19 nt, Artificial Sequence
  Description of Artificial Sequence: Synthetic oligonucleotide
ggccgacgggccugacgcg

SEQ ID NO: 148122 - RNA, 19 nt, Artificial Sequence
  Description of Artificial Sequence: Synthetic oligonucleotide
gggcggguugaacgcgcug

SEQ ID NO: 148123 - RNA, 19 nt, Artificial Sequence
  Description of Artificial Sequence: Synthetic oligonucleotide
ggugaggcggucacccggg

SEQ ID NO: 148124 - RNA, 19 nt, Artificial Sequence
  Description of Artificial Sequence: Synthetic oligonucleotide
gcuacggcggccggcaggg

SEQ ID NO: 148125 - RNA, 19 nt, Artificial Sequence
  Description of Artificial Sequence: Synthetic oligonucleotide
gggcaguggcggccguugu

SEQ ID NO: 148126 - RNA, 19 nt, Artificial Sequence
  Description of Artificial Sequence: Synthetic oligonucleotide
ucuagggcccggagguggg

SEQ ID NO: 148127 - RNA, 19 nt, Artificial Sequence
  Description of Artificial Sequence: Synthetic oligonucleotide
ggccgcgcgccucgggcgc

SEQ ID NO: 148128 - RNA, 19 nt, Artificial Sequence
  Description of Artificial Sequence: Synthetic oligonucleotide
cuacgaacccggcaggccc

SEQ ID NO: 148129 - RNA, 19 nt, Artificial Sequence
  Description of Artificial Sequence: Synthetic oligonucleotide
cacgcuuggcugcggccgg

SEQ ID NO: 148130 - RNA, 19 nt, Artificial Sequence
  Description of Artificial Sequence: Synthetic oligonucleotide
ggugcgggcugaggccaug

SEQ ID NO: 148131 - RNA, 19 nt, Artificial Sequence
  Description of Artificial Sequence: Synthetic oligonucleotide
gggcgaccgcggcagcucc

SEQ ID NO: 148132 - RNA, 19 nt, Artificial Sequence
  Description of Artificial Sequence: Synthetic oligonucleotide
ccggcgccggaggacaggg

SEQ ID NO: 148133 - RNA, 19 nt, Artificial Sequence
  Description of Artificial Sequence: Synthetic oligonucleotide
gucgcggcccucgagccac

SEQ ID NO: 148134 - RNA, 19 nt, Artificial Sequence
  Description of Artificial Sequence: Synthetic oligonucleotide
cggcggcggcgggccugcg

SEQ ID NO: 148135 - RNA, 19 nt, Artificial Sequence
  Description of Artificial Sequence: Synthetic oligonucleotide
ggcggcggaagaggaggug

SEQ ID NO: 148136 - RNA, 19 nt, Artificial Sequence
  Description of Artificial Sequence: Synthetic oligonucleotide
gcgggacgccgcugcgggc

SEQ ID NO: 148137 - RNA, 19 nt, Artificial Sequence
  Description of Artificial Sequence: Synthetic oligonucleotide
ccccgacgugggagccgcg

SEQ ID NO: 148138 - RNA, 19 nt, Artificial Sequence
  Description of Artificial Sequence: Synthetic oligonucleotide
gggggacgcgccagccccg

SEQ ID NO: 148139 - RNA, 19 nt, Artificial Sequence
  Description of Artificial Sequence: Synthetic oligonucleotide
ggcccccaacaaggacgga

SEQ ID NO: 148140 - RNA, 19 nt, Artificial Sequence
  Description of Artificial Sequence: Synthetic oligonucleotide
agacgccggcgugggcagc

SEQ ID NO: 148141 - RNA, 19 nt, Artificial Sequence
  Description of Artificial Sequence: Synthetic oligonucleotide
cggccacugggagcugagg

SEQ ID NO: 148142 - RNA, 19 nt, Artificial Sequence
  Description of Artificial Sequence: Synthetic oligonucleotide
gugccaucgccugcaggau

SEQ ID NO: 148143 - RNA, 19 nt, Artificial Sequence
  Description of Artificial Sequence: Synthetic oligonucleotide
uucuuuauucagcucugac

SEQ ID NO: 148144 - RNA, 19 nt, Artificial Sequence
  Description of Artificial Sequence: Synthetic oligonucleotide
caguggcuucagcaacuac

SEQ ID NO: 148145 - RNA, 19 nt, Artificial Sequence
  Description of Artificial Sequence: Synthetic oligonucleotide
ccguggcauccugaacugg

SEQ ID NO: 148146 - RNA, 19 nt, Artificial Sequence
  Description of Artificial Sequence: Synthetic oligonucleotide
guguguggugaugcugauc

SEQ ID NO: 148147 - RNA, 19 nt, Artificial Sequence
  Description of Artificial Sequence: Synthetic oligonucleotide
cuugagcaaugcccgguua

SEQ ID NO: 148148 - RNA, 19 nt, Artificial Sequence
  Description of Artificial Sequence: Synthetic oligonucleotide
auuucuggagaaccucauc

SEQ ID NO: 148149 - RNA, 19 nt, Artificial Sequence
  Description of Artificial Sequence: Synthetic oligonucleotide
caaguauggcauccuggug

SEQ ID NO: 148150 - RNA, 19 nt, Artificial Sequence
  Description of Artificial Sequence: Synthetic oligonucleotide
ggaccccauccaggugguu

SEQ ID NO: 148151 - RNA, 19 nt, Artificial Sequence
  Description of Artificial Sequence: Synthetic oligonucleotide
uucucuguuccugaaggau

SEQ ID NO: 148152 - RNA, 19 nt, Artificial Sequence
  Description of Artificial Sequence: Synthetic oligonucleotide
ucccuauagcuggcccgcc

SEQ ID NO: 148153 - RNA, 19 nt, Artificial Sequence
  Description of Artificial Sequence: Synthetic oligonucleotide
cccaugccugguuauugcg

SEQ ID NO: 148154 - RNA, 19 nt, Artificial Sequence
  Description of Artificial Sequence: Synthetic oligonucleotide
ggccaaugucuuugcugug

SEQ ID NO: 148155 - RNA, 19 nt, Artificial Sequence
  Description of Artificial Sequence: Synthetic oligonucleotide
ggcugcauuccagguugag

SEQ ID NO: 148156 - RNA, 19 nt, Artificial Sequence
  Description of Artificial Sequence: Synthetic oligonucleotide
gaagcgccuggcggugggu

SEQ ID NO: 148157 - RNA, 19 nt, Artificial Sequence
  Description of Artificial Sequence: Synthetic oligonucleotide
ugcccugacggagcaggcg

SEQ ID NO: 148158 - RNA, 19 nt, Artificial Sequence
  Description of Artificial Sequence: Synthetic oligonucleotide
gggacugcugcugcacgug

SEQ ID NO: 148159 - RNA, 19 nt, Artificial Sequence
  Description of Artificial Sequence: Synthetic oligonucleotide
ggccaaccuggccaccauu

SEQ ID NO: 148160 - RNA, 19 nt, Artificial Sequence
  Description of Artificial Sequence: Synthetic oligonucleotide
ucuguguuucccagcggcu

SEQ ID NO: 148161 - RNA, 19 nt, Artificial Sequence
  Description of Artificial Sequence: Synthetic oligonucleotide
uguggucuuacugguugag

SEQ ID NO: 148162 - RNA, 19 nt, Artificial Sequence
  Description of Artificial Sequence: Synthetic oligonucleotide
gucuaucacuccagugggc

SEQ ID NO: 148163 - RNA, 19 nt, Artificial Sequence
  Description of Artificial Sequence: Synthetic oligonucleotide
cucccugcuggcgcugaug

SEQ ID NO: 148164 - RNA, 19 nt, Artificial Sequence
  Description of Artificial Sequence: Synthetic oligonucleotide
ggcgcacaccauccucuuc

SEQ ID NO: 148165 - RNA, 19 nt, Artificial Sequence
  Description of Artificial Sequence: Synthetic oligonucleotide
ccucaagcucuucuccuac

SEQ ID NO: 148166 - RNA, 19 nt, Artificial Sequence
  Description of Artificial Sequence: Synthetic oligonucleotide
ccgcgacgucaacucaugg

SEQ ID NO: 148167 - RNA, 19 nt, Artificial Sequence
  Description of Artificial Sequence: Synthetic oligonucleotide
gugccgcagggccagggcc

SEQ ID NO: 148168 - RNA, 19 nt, Artificial Sequence
  Description of Artificial Sequence: Synthetic oligonucleotide
caaggcugccucugcaggg

SEQ ID NO: 148169 - RNA, 19 nt, Artificial Sequence
  Description of Artificial Sequence: Synthetic oligonucleotide
gaagaaggccagcagugcu

SEQ ID NO: 148170 - RNA, 19 nt, Artificial Sequence
  Description of Artificial Sequence: Synthetic oligonucleotide
ugcugccccgcacaccgug

SEQ ID NO: 148171 - RNA, 19 nt, Artificial Sequence
  Description of Artificial Sequence: Synthetic oligonucleotide
gagcuacccggacaaucug

SEQ ID NO: 148172 - RNA, 19 nt, Artificial Sequence
  Description of Artificial Sequence: Synthetic oligonucleotide
gaccuaccgcgaucucuac

SEQ ID NO: 148173 - RNA, 19 nt, Artificial Sequence
  Description of Artificial Sequence: Synthetic oligonucleotide
cuacuuccucuucgccccc

SEQ ID NO: 148174 - RNA, 19 nt, Artificial Sequence
  Description of Artificial Sequence: Synthetic oligonucleotide
caccuugugcuacgagcuc

SEQ ID NO: 148175 - RNA, 19 nt, Artificial Sequence
  Description of Artificial Sequence: Synthetic oligonucleotide
caacuuuccccgcucuccc

SEQ ID NO: 148176 - RNA, 19 nt, Artificial Sequence
  Description of Artificial Sequence: Synthetic oligonucleotide
ccgcauccggaagcgcuuu

SEQ ID NO: 148177 - RNA, 19 nt, Artificial Sequence
  Description of Artificial Sequence: Synthetic oligonucleotide
ucugcugcgacggauccuu

SEQ ID NO: 148178 - RNA, 19 nt, Artificial Sequence
  Description of Artificial Sequence: Synthetic oligonucleotide
ugagaugcuguucuucacc

SEQ ID NO: 148179 - RNA, 19 nt, Artificial Sequence
  Description of Artificial Sequence: Synthetic oligonucleotide
ccagcuccagguggggcug

SEQ ID NO: 148180 - RNA, 19 nt, Artificial Sequence
  Description of Artificial Sequence: Synthetic oligonucleotide
gauccagcaguggaugguc

SEQ ID NO: 148181 - RNA, 19 nt, Artificial Sequence
  Description of Artificial Sequence: Synthetic oligonucleotide
ccccaccauccagaacucc

SEQ ID NO: 148182 - RNA, 19 nt, Artificial Sequence
  Description of Artificial Sequence: Synthetic oligonucleotide
caugaagcccuucaaggac

SEQ ID NO: 148183 - RNA, 19 nt, Artificial Sequence
  Description of Artificial Sequence: Synthetic oligonucleotide
cauggacuacucacgcauc

SEQ ID NO: 148184 - RNA, 19 nt, Artificial Sequence
  Description of Artificial Sequence: Synthetic oligonucleotide
caucgagcgccuccugaag

SEQ ID NO: 148185 - RNA, 19 nt, Artificial Sequence
  Description of Artificial Sequence: Synthetic oligonucleotide
gcuggcgguccccaaucac

SEQ ID NO: 148186 - RNA, 19 nt, Artificial Sequence
  Description of Artificial Sequence: Synthetic oligonucleotide
ccucaucuggcucaucuuc

SEQ ID NO: 148187 - RNA, 19 nt, Artificial Sequence
  Description of Artificial Sequence: Synthetic oligonucleotide
cuucuacuggcucuuccac

SEQ ID NO: 148188 - RNA, 19 nt, Artificial Sequence
  Description of Artificial Sequence: Synthetic oligonucleotide
cuccugccugaaugccgug

SEQ ID NO: 148189 - RNA, 19 nt, Artificial Sequence
  Description of Artificial Sequence: Synthetic oligonucleotide
ggcugagcucaugcaguuu

SEQ ID NO: 148190 - RNA, 19 nt, Artificial Sequence
  Description of Artificial Sequence: Synthetic oligonucleotide
uggagaccgggaguucuac

SEQ ID NO: 148191 - RNA, 19 nt, Artificial Sequence
  Description of Artificial Sequence: Synthetic oligonucleotide
ccgggacugguggaacucc

SEQ ID NO: 148192 - RNA, 19 nt, Artificial Sequence
  Description of Artificial Sequence: Synthetic oligonucleotide
cgagucugucaccuacuuc

SEQ ID NO: 148193 - RNA, 19 nt, Artificial Sequence
  Description of Artificial Sequence: Synthetic oligonucleotide
cuggcagaacuggaacauc

SEQ ID NO: 148194 - RNA, 19 nt, Artificial Sequence
  Description of Artificial Sequence: Synthetic oligonucleotide
cccugugcacaaguggugc

SEQ ID NO: 148195 - RNA, 19 nt, Artificial Sequence
  Description of Artificial Sequence: Synthetic oligonucleotide
caucagacacuucuacaag

SEQ ID NO: 148196 - RNA, 19 nt, Artificial Sequence
  Description of Artificial Sequence: Synthetic oligonucleotide
gcccaugcuucgacggggc

SEQ ID NO: 148197 - RNA, 19 nt, Artificial Sequence
  Description of Artificial Sequence: Synthetic oligonucleotide
cagcagcaaguggauggcc

SEQ ID NO: 148198 - RNA, 19 nt, Artificial Sequence
  Description of Artificial Sequence: Synthetic oligonucleotide
caggacagggguguuccug

SEQ ID NO: 148199 - RNA, 19 nt, Artificial Sequence
  Description of Artificial Sequence: Synthetic oligonucleotide
ggccucggccuucuuccac

SEQ ID NO: 148200 - RNA, 19 nt, Artificial Sequence
  Description of Artificial Sequence: Synthetic oligonucleotide
cgaguaccuggugagcguc

SEQ ID NO: 148201 - RNA, 19 nt, Artificial Sequence
  Description of Artificial Sequence: Synthetic oligonucleotide
cccucugcgaauguuccgc

SEQ ID NO: 148202 - RNA, 19 nt, Artificial Sequence
  Description of Artificial Sequence: Synthetic oligonucleotide
ccucugggcguucacgggc

SEQ ID NO: 148203 - RNA, 19 nt, Artificial Sequence
  Description of Artificial Sequence: Synthetic oligonucleotide
caugauggcucagauccca

SEQ ID NO: 148204 - RNA, 19 nt, Artificial Sequence
  Description of Artificial Sequence: Synthetic oligonucleotide
acuggccugguucgugggc

SEQ ID NO: 148205 - RNA, 19 nt, Artificial Sequence
  Description of Artificial Sequence: Synthetic oligonucleotide
ccgcuuuuuccagggcaac

SEQ ID NO: 148206 - RNA, 19 nt, Artificial Sequence
  Description of Artificial Sequence: Synthetic oligonucleotide
cuauggcaacgcagcugug

SEQ ID NO: 148207 - RNA, 19 nt, Artificial Sequence
  Description of Artificial Sequence: Synthetic oligonucleotide
guggcugucgcucaucauc

SEQ ID NO: 148208 - RNA, 19 nt, Artificial Sequence
  Description of Artificial Sequence: Synthetic oligonucleotide
cggacagccaauagccguc

SEQ ID NO: 148209 - RNA, 19 nt, Artificial Sequence
  Description of Artificial Sequence: Synthetic oligonucleotide
ccucauguacguccacgac

SEQ ID NO: 148210 - RNA, 19 nt, Artificial Sequence
  Description of Artificial Sequence: Synthetic oligonucleotide
cuacuacgugcucaacuau

SEQ ID NO: 148211 - RNA, 19 nt, Artificial Sequence
  Description of Artificial Sequence: Synthetic oligonucleotide
ugaggccccagcggcagag

SEQ ID NO: 148212 - RNA, 19 nt, Artificial Sequence
  Description of Artificial Sequence: Synthetic oligonucleotide
ggccugagcugcaccugag

SEQ ID NO: 148213 - RNA, 19 nt, Artificial Sequence
  Description of Artificial Sequence: Synthetic oligonucleotide
gggccuggcuucucacugc

SEQ ID NO: 148214 - RNA, 19 nt, Artificial Sequence
  Description of Artificial Sequence: Synthetic oligonucleotide
ccaccucacacccgcugcc

SEQ ID NO: 148215 - RNA, 19 nt, Artificial Sequence
  Description of Artificial Sequence: Synthetic oligonucleotide
cagagcccaccucuccucc

SEQ ID NO: 148216 - RNA, 19 nt, Artificial Sequence
  Description of Artificial Sequence: Synthetic oligonucleotide
cuaggccucgagugcuggg

SEQ ID NO: 148217 - RNA, 19 nt, Artificial Sequence
  Description of Artificial Sequence: Synthetic oligonucleotide
ggaugggccuggcugcaca

SEQ ID NO: 148218 - RNA, 19 nt, Artificial Sequence
  Description of Artificial Sequence: Synthetic oligonucleotide
agcauccuccucugguccc

SEQ ID NO: 148219 - RNA, 19 nt, Artificial Sequence
  Description of Artificial Sequence: Synthetic oligonucleotide
cagggaggccucucugccc

SEQ ID NO: 148220 - RNA, 19 nt, Artificial Sequence
  Description of Artificial Sequence: Synthetic oligonucleotide
ccuauggggcucuguccug

SEQ ID NO: 148221 - RNA, 19 nt, Artificial Sequence
  Description of Artificial Sequence: Synthetic oligonucleotide
gcaccccucagggauggcg

SEQ ID NO: 148222 - RNA, 19 nt, Artificial Sequence
  Description of Artificial Sequence: Synthetic oligonucleotide
gacagcaggccagacacag

SEQ ID NO: 148223 - RNA, 19 nt, Artificial Sequence
  Description of Artificial Sequence: Synthetic oligonucleotide
gucugaugccagcugggag

SEQ ID NO: 148224 - RNA, 19 nt, Artificial Sequence
  Description of Artificial Sequence: Synthetic oligonucleotide
gucuugcugacccugcccc

SEQ ID NO: 148225 - RNA, 19 nt, Artificial Sequence
  Description of Artificial Sequence: Synthetic oligonucleotide
cggguccgagggugucaau

SEQ ID NO: 148226 - RNA, 19 nt, Artificial Sequence
  Description of Artificial Sequence: Synthetic oligonucleotide
uaaagugcuguccagugaa

SEQ ID NO: 148227 - RNA, 25 nt, Artificial Sequence
  Description of Artificial Sequence: Synthetic oligonucleotide
cgccucaggucggccgcggacuaca

SEQ ID NO: 148228 - RNA, 25 nt, Artificial Sequence
  Description of Artificial Sequence: Synthetic oligonucleotide
aaauggacgagagaggcggccgucc

SEQ ID NO: 148229 - RNA, 25 nt, Artificial Sequence
  Description of Artificial Sequence: Synthetic oligonucleotide
cauuaguuagcggcuccggagcaac

SEQ ID NO: 148230 - RNA, 25 nt, Artificial Sequence
  Description of Artificial Sequence: Synthetic oligonucleotide
cgcagccguuguccuugaggccgac

SEQ ID NO: 148231 - RNA, 25 nt, Artificial Sequence
  Description of Artificial Sequence: Synthetic oligonucleotide
cgggccugacgcgggcggguugaac

SEQ ID NO: 148232 - RNA, 25 nt, Artificial Sequence
  Description of Artificial Sequence: Synthetic oligonucleotide
cgcgcuggugaggcggucacccggg

SEQ ID NO: 148233 - RNA, 25 nt, Artificial Sequence
  Description of Artificial Sequence: Synthetic oligonucleotide
gcuacggcggccggcagggggcagu

SEQ ID NO: 148234 - RNA, 25 nt, Artificial Sequence
  Description of Artificial Sequence: Synthetic oligonucleotide
uggcggccguugucuagggcccgga

SEQ ID NO: 148235 - RNA, 25 nt, Artificial Sequence
  Description of Artificial Sequence: Synthetic oligonucleotide
agguggggccgcgcgccucgggcgc

SEQ ID NO: 148236 - RNA, 25 nt, Artificial Sequence
  Description of Artificial Sequence: Synthetic oligonucleotide
cuacgaacccggcaggcccacgcuu

SEQ ID NO: 148237 - RNA, 25 nt, Artificial Sequence
  Description of Artificial Sequence: Synthetic oligonucleotide
uggcugcggccgggugcgggcugag

SEQ ID NO: 148238 - RNA, 25 nt, Artificial Sequence
  Description of Artificial Sequence: Synthetic oligonucleotide
ggccaugggcgaccgcggcagcucc

SEQ ID NO: 148239 - RNA, 25 nt, Artificial Sequence
  Description of Artificial Sequence: Synthetic oligonucleotide
ccggcgccggaggacagggucgcgg

SEQ ID NO: 148240 - RNA, 25 nt, Artificial Sequence
  Description of Artificial Sequence: Synthetic oligonucleotide
gcccucgagccacggcggcggcggg

SEQ ID NO: 148241 - RNA, 25 nt, Artificial Sequence
  Description of Artificial Sequence: Synthetic oligonucleotide
gccugcggcggcggaagaggaggug

SEQ ID NO: 148242 - RNA, 25 nt, Artificial Sequence
  Description of Artificial Sequence: Synthetic oligonucleotide
gcgggacgccgcugcgggccccgac

SEQ ID NO: 148243 - RNA, 25 nt, Artificial Sequence
  Description of Artificial Sequence: Synthetic oligonucleotide
cgugggagccgcgggggacgcgcca

SEQ ID NO: 148244 - RNA, 25 nt, Artificial Sequence
  Description of Artificial Sequence: Synthetic oligonucleotide
agccccggcccccaacaaggacgga

SEQ ID NO: 148245 - RNA, 25 nt, Artificial Sequence
  Description of Artificial Sequence: Synthetic oligonucleotide
agacgccggcgugggcagcggccac

SEQ ID NO: 148246 - RNA, 25 nt, Artificial Sequence
  Description of Artificial Sequence: Synthetic oligonucleotide
cugggagcugaggugccaucgccug

SEQ ID NO: 148247 - RNA, 25 nt, Artificial Sequence
  Description of Artificial Sequence: Synthetic oligonucleotide
gcaggauucuuuauucagcucugac

SEQ ID NO: 148248 - RNA, 25 nt, Artificial Sequence
  Description of Artificial Sequence: Synthetic oligonucleotide
caguggcuucagcaacuaccguggc

SEQ ID NO: 148249 - RNA, 25 nt, Artificial Sequence
  Description of Artificial Sequence: Synthetic oligonucleotide
cauccugaacugguguguggugaug

SEQ ID NO: 148250 - RNA, 25 nt, Artificial Sequence
  Description of Artificial Sequence: Synthetic oligonucleotide
gcugaucuugagcaaugcccgguua

SEQ ID NO: 148251 - RNA, 25 nt, Artificial Sequence
  Description of Artificial Sequence: Synthetic oligonucleotide
auuucuggagaaccucaucaaguau

SEQ ID NO: 148252 - RNA, 25 nt, Artificial Sequence
  Description of Artificial Sequence: Synthetic oligonucleotide
uggcauccugguggaccccauccag

SEQ ID NO: 148253 - RNA, 25 nt, Artificial Sequence
  Description of Artificial Sequence: Synthetic oligonucleotide
ggugguuucucuguuccugaaggau

SEQ ID NO: 148254 - RNA, 25 nt, Artificial Sequence
  Description of Artificial Sequence: Synthetic oligonucleotide
ucccuauagcuggcccgccccaugc

SEQ ID NO: 148255 - RNA, 25 nt, Artificial Sequence
  Description of Artificial Sequence: Synthetic oligonucleotide
ccugguuauugcggccaaugucuuu

SEQ ID NO: 148256 - RNA, 25 nt, Artificial Sequence
  Description of Artificial Sequence: Synthetic oligonucleotide
ugcuguggcugcauuccagguugag

SEQ ID NO: 148257 - RNA, 25 nt, Artificial Sequence
  Description of Artificial Sequence: Synthetic oligonucleotide
gaagcgccuggcggugggugcccug

SEQ ID NO: 148258 - RNA, 25 nt, Artificial Sequence
  Description of Artificial Sequence: Synthetic oligonucleotide
gacggagcaggcgggacugcugcug

SEQ ID NO: 148259 - RNA, 25 nt, Artificial Sequence
  Description of Artificial Sequence: Synthetic oligonucleotide
gcacguggccaaccuggccaccauu

SEQ ID NO: 148260 - RNA, 25 nt, Artificial Sequence
  Description of Artificial Sequence: Synthetic oligonucleotide
ucuguguuucccagcggcugugguc

SEQ ID NO: 148261 - RNA, 25 nt, Artificial Sequence
  Description of Artificial Sequence: Synthetic oligonucleotide
cuuacugguugagucuaucacucca

SEQ ID NO: 148262 - RNA, 25 nt, Artificial Sequence
  Description of Artificial Sequence: Synthetic oligonucleotide
agugggcucccugcuggcgcugaug

SEQ ID NO: 148263 - RNA, 25 nt, Artificial Sequence
  Description of Artificial Sequence: Synthetic oligonucleotide
ggcgcacaccauccucuuccucaag

SEQ ID NO: 148264 - RNA, 25 nt, Artificial Sequence
  Description of Artificial Sequence: Synthetic oligonucleotide
gcucuucuccuaccgcgacgucaac

SEQ ID NO: 148265 - RNA, 25 nt, Artificial Sequence
  Description of Artificial Sequence: Synthetic oligonucleotide
cucauggugccgcagggccagggcc

SEQ ID NO: 148266 - RNA, 25 nt, Artificial Sequence
  Description of Artificial Sequence: Synthetic oligonucleotide
caaggcugccucugcagggaagaag

SEQ ID NO: 148267 - RNA, 25 nt, Artificial Sequence
  Description of Artificial Sequence: Synthetic oligonucleotide
ggccagcagugcugcugccccgcac

SEQ ID NO: 148268 - RNA, 25 nt, Artificial Sequence
  Description of Artificial Sequence: Synthetic oligonucleotide
caccgugagcuacccggacaaucug

SEQ ID NO: 148269 - RNA, 25 nt, Artificial Sequence
  Description of Artificial Sequence: Synthetic oligonucleotide
gaccuaccgcgaucucuacuacuuc

SEQ ID NO: 148270 - RNA, 25 nt, Artificial Sequence
  Description of Artificial Sequence: Synthetic oligonucleotide
ccucuucgcccccaccuugugcuac

SEQ ID NO: 148271 - RNA, 25 nt, Artificial Sequence
  Description of Artificial Sequence: Synthetic oligonucleotide
cgagcucaacuuuccccgcucuccc

SEQ ID NO: 148272 - RNA, 25 nt, Artificial Sequence
  Description of Artificial Sequence: Synthetic oligonucleotide
ccgcauccggaagcgcuuucugcug

SEQ ID NO: 148273 - RNA, 25 nt, Artificial Sequence
  Description of Artificial Sequence: Synthetic oligonucleotide
gcgacggauccuugagaugcuguuc

SEQ ID NO: 148274 - RNA, 25 nt, Artificial Sequence
  Description of Artificial Sequence: Synthetic oligonucleotide
cuucacccagcuccagguggggcug

SEQ ID NO: 148275 - RNA, 25 nt, Artificial Sequence
  Description of Artificial Sequence: Synthetic oligonucleotide
gauccagcaguggaugguccccacc

SEQ ID NO: 148276 - RNA, 25 nt, Artificial Sequence
  Description of Artificial Sequence: Synthetic oligonucleotide
cauccagaacuccaugaagcccuuc

SEQ ID NO: 148277 - RNA, 25 nt, Artificial Sequence
  Description of Artificial Sequence: Synthetic oligonucleotide
caaggacauggacuacucacgcauc

SEQ ID NO: 148278 - RNA, 25 nt, Artificial Sequence
  Description of Artificial Sequence: Synthetic oligonucleotide
caucgagcgccuccugaagcuggcg

SEQ ID NO: 148279 - RNA, 25 nt, Artificial Sequence
  Description of Artificial Sequence: Synthetic oligonucleotide
gguccccaaucaccucaucuggcuc

SEQ ID NO: 148280 - RNA, 25 nt, Artificial Sequence
  Description of Artificial Sequence: Synthetic oligonucleotide
caucuucuucuacuggcucuuccac

SEQ ID NO: 148281 - RNA, 25 nt, Artificial Sequence
  Description of Artificial Sequence: Synthetic oligonucleotide
cuccugccugaaugccguggcugag

SEQ ID NO: 148282 - RNA, 25 nt, Artificial Sequence
  Description of Artificial Sequence: Synthetic oligonucleotide
gcucaugcaguuuggagaccgggag

SEQ ID NO: 148283 - RNA, 25 nt, Artificial Sequence
  Description of Artificial Sequence: Synthetic oligonucleotide
guucuaccgggacugguggaacucc

SEQ ID NO: 148284 - RNA, 25 nt, Artificial Sequence
  Description of Artificial Sequence: Synthetic oligonucleotide
cgagucugucaccuacuucuggcag

SEQ ID NO: 148285 - RNA, 25 nt, Artificial Sequence
  Description of Artificial Sequence: Synthetic oligonucleotide
gaacuggaacaucccugugcacaag

SEQ ID NO: 148286 - RNA, 25 nt, Artificial Sequence
  Description of Artificial Sequence: Synthetic oligonucleotide
guggugcaucagacacuucuacaag

SEQ ID NO: 148287 - RNA, 25 nt, Artificial Sequence
  Description of Artificial Sequence: Synthetic oligonucleotide
gcccaugcuucgacggggcagcagc

SEQ ID NO: 148288 - RNA, 25 nt, Artificial Sequence
  Description of Artificial Sequence: Synthetic oligonucleotide
caaguggauggccaggacaggggug

SEQ ID NO: 148289 - RNA, 25 nt, Artificial Sequence
  Description of Artificial Sequence: Synthetic oligonucleotide
guuccuggccucggccuucuuccac

SEQ ID NO: 148290 - RNA, 25 nt, Artificial Sequence
  Description of Artificial Sequence: Synthetic oligonucleotide
cgaguaccuggugagcgucccucug

SEQ ID NO: 148291 - RNA, 25 nt, Artificial Sequence
  Description of Artificial Sequence: Synthetic oligonucleotide
gcgaauguuccgccucugggcguuc

SEQ ID NO: 148292 - RNA, 25 nt, Artificial Sequence
  Description of Artificial Sequence: Synthetic oligonucleotide
cacgggcaugauggcucagauccca

SEQ ID NO: 148293 - RNA, 25 nt, Artificial Sequence
  Description of Artificial Sequence: Synthetic oligonucleotide
acuggccugguucgugggccgcuuu

SEQ ID NO: 148294 - RNA, 25 nt, Artificial Sequence
  Description of Artificial Sequence: Synthetic oligonucleotide
uuuccagggcaacuauggcaacgca

SEQ ID NO: 148295 - RNA, 25 nt, Artificial Sequence
  Description of Artificial Sequence: Synthetic oligonucleotide
agcuguguggcugucgcucaucauc

SEQ ID NO: 148296 - RNA, 25 nt, Artificial Sequence
  Description of Artificial Sequence: Synthetic oligonucleotide
cggacagccaauagccguccucaug

SEQ ID NO: 148297 - RNA, 25 nt, Artificial Sequence
  Description of Artificial Sequence: Synthetic oligonucleotide
guacguccacgacuacuacgugcuc

SEQ ID NO: 148298 - RNA, 25 nt, Artificial Sequence
  Description of Artificial Sequence: Synthetic oligonucleotide
caacuaugaggccccagcggcagag

SEQ ID NO: 148299 - RNA, 25 nt, Artificial Sequence
  Description of Artificial Sequence: Synthetic oligonucleotide
ggccugagcugcaccugagggccug

SEQ ID NO: 148300 - RNA, 25 nt, Artificial Sequence
  Description of Artificial Sequence: Synthetic oligonucleotide
ggcuucucacugccaccucacaccc

SEQ ID NO: 148301 - RNA, 25 nt, Artificial Sequence
  Description of Artificial Sequence: Synthetic oligonucleotide
cgcugccagagcccaccucuccucc

SEQ ID NO: 148302 - RNA, 25 nt, Artificial Sequence
  Description of Artificial Sequence: Synthetic oligonucleotide
cuaggccucgagugcuggggauggg

SEQ ID NO: 148303 - RNA, 25 nt, Artificial Sequence
  Description of Artificial Sequence: Synthetic oligonucleotide
gccuggcugcacagcauccuccucu

SEQ ID NO: 148304 - RNA, 25 nt, Artificial Sequence
  Description of Artificial Sequence: Synthetic oligonucleotide
uggucccagggaggccucucugccc

SEQ ID NO: 148305 - RNA, 25 nt, Artificial Sequence
  Description of Artificial Sequence: Synthetic oligonucleotide
ccuauggggcucuguccugcacccc

SEQ ID NO: 148306 - RNA, 25 nt, Artificial Sequence
  Description of Artificial Sequence: Synthetic oligonucleotide
cucagggauggcgacagcaggccag

SEQ ID NO: 148307 - RNA, 25 nt, Artificial Sequence
  Description of Artificial Sequence: Synthetic oligonucleotide
gacacagucugaugccagcugggag

SEQ ID NO: 148308 - RNA, 25 nt, Artificial Sequence
  Description of Artificial Sequence: Synthetic oligonucleotide
gucuugcugacccugccccgggucc

SEQ ID NO: 148309 - RNA, 25 nt, Artificial Sequence
  Description of Artificial Sequence: Synthetic oligonucleotide
cgagggugucaauaaagugcugucc

SEQ ID NO: 148310 - RNA, 2439 nt, Homo sapiens
cuccgggaacgccagcgccgcggcugccgccucugcuggggucuaggcuguuucucucgcgccaccacuggccgccggccgcagcuccagguguccuagccgcccagccucgacgccgucccgggaccccugugcucugcgcgaagcccuggccccgggggccggggcaugggccaggggcgcggggugaagcggcuucccgcggggccgugacugggcgggcuucagccaugaagacccucauagccgccuacuccgggguccugcgcggcgagcgucaggccgaggcugaccggagccagcgcucucacggaggaccugcgcugucgcgcgaggggucugggagauggggcacuggauccagcauccucuccgcccuccaggaccucuucucugucaccuggcucaauagguccaagguggaaaagcagcuacaggucaucucagugcuccaguggguccuguccuuccuuguacugggaguggccugcagugccauccucauguacauauucugcacugauugcuggcucaucgcugugcucuacuucacuuggcugguguuugacuggaacacacccaagaaagguggcaggaggucacaguggguccgaaacugggcuguguggcgcuacuuucgagacuacuuucccauccagcuggugaagacacacaaccugcugaccaccaggaacuauaucuuuggauaccacccccaugguaucaugggccugggugccuucugcaacuucagcacagaggccacagaagugagcaagaaguucccaggcauacggccuuaccuggcuacacuggcaggcaacuuccgaaugccuguguugagggaguaccugaugucuggagguaucugcccugucagccgggacaccauagacuauuugcuuucaaagaaugggaguggcaaugcuaucaucaucguggucgggggugcggcugagucucugagcuccaugccuggcaagaaugcagucacccugcggaaccgcaagggcuuugugaaacuggcccugcgucauggagcugaccugguucccaucuacuccuuuggagagaaugaaguguacaagcaggugaucuucgaggagggcuccuggggccgauggguccagaagaaguuccagaaauacauugguuucgccccaugcaucuuccauggucgaggccucuucuccuccgacaccugggggcuggugcccuacuccaagcccaucaccacuguugugggagagcccaucaccauccccaagcuggagcacccaacccagcaagacaucgaccuguaccacaccauguacauggaggcccuggugaagcucuucgacaagcacaagaccaaguucggccucccggagacugagguccuggaggugaacugagccagccuucggggccaacucccuggaggaaccagcugcaaaucacuuuuuugcucuguaaauuuggaagugucaugggugucuguggguuauuuaaaagaaauuauaacaauuuugcuaaaccauuacaauguuaggucuuuuuuaagaaggaaaaagucaguauuucaaguucuuucacuuccagcuugcccuguucuaggugguggcuaaaucugggccuaaucuggguggcucagcuaaccucucuucuucccuuccugaagugacaaaggaaacucagucuucuuggggaagaaggauugccauuagugacuuggaccaguuagaugauucacuuuuugccccuagggaugagaggcgaaagccacuucucauacaagccccuuuauugccacuaccccacgcucgucuaguccugaaacugcaggaccaguuucucugccaaggggaggaguuggagagcacaguugccccguugugugagggcaguaguaggcaucuggaaugcuccaguuugaucucccuucugccaccccuaccucaccccuagucacucauaucggagccuggacuggccuccaggaugaggauggggguggcaaugacacccugcaggggaaaggacugccccccaugcaccauugcagggaggaugccgccaccaugagcuagguggaguaacugguuuuucuuggguggcugaugacauggaugcagcacagacucagccuuggccuggagcacaugcuuacugguggccucaguuuaccuuccccagauccuagauucuggaugugaggaagagaucccucuucagaaggggccuggccuucugagcagcagauuaguuccaaagcagguggcccccgaacccaagccucacuuuucugugccuuccugaggggguugggccggggaggaaacccaacccucuccuguguguucuguuaucucuugaugagaucauugcaccaugucagacuuuuguauaugccuugaaaauaaaugaaagugagaauccaaaaaaaaaaaaaaaaaa

SEQ ID NO: 148311 - RNA, 19 nt, Artificial Sequence
  Description of Artificial Sequence: Synthetic oligonucleotide
cuccgggaacgccagcgcc

SEQ ID NO: 148312 - RNA, 19 nt, Artificial Sequence
  Description of Artificial Sequence: Synthetic oligonucleotide
cgcggcugccgccucugcu

SEQ ID NO: 148313 - RNA, 19 nt, Artificial Sequence
  Description of Artificial Sequence: Synthetic oligonucleotide
uggggucuaggcuguuucu

SEQ ID NO: 148314 - RNA, 19 nt, Artificial Sequence
  Description of Artificial Sequence: Synthetic oligonucleotide
ucucgcgccaccacuggcc

SEQ ID NO: 148315 - RNA, 19 nt, Artificial Sequence
  Description of Artificial Sequence: Synthetic oligonucleotide
cgccggccgcagcuccagg

SEQ ID NO: 148316 - RNA, 19 nt, Artificial Sequence
  Description of Artificial Sequence: Synthetic oligonucleotide
guguccuagccgcccagcc

SEQ ID NO: 148317 - RNA, 19 nt, Artificial Sequence
  Description of Artificial Sequence: Synthetic oligonucleotide
cucgacgccgucccgggac

SEQ ID NO: 148318 - RNA, 19 nt, Artificial Sequence
  Description of Artificial Sequence: Synthetic oligonucleotide
ccccugugcucugcgcgaa

SEQ ID NO: 148319 - RNA, 19 nt, Artificial Sequence
  Description of Artificial Sequence: Synthetic oligonucleotide
agcccuggccccgggggcc

SEQ ID NO: 148320 - RNA, 19 nt, Artificial Sequence
  Description of Artificial Sequence: Synthetic oligonucleotide
cggggcaugggccaggggc

SEQ ID NO: 148321 - RNA, 19 nt, Artificial Sequence
  Description of Artificial Sequence: Synthetic oligonucleotide
cgcggggugaagcggcuuc

SEQ ID NO: 148322 - RNA, 19 nt, Artificial Sequence
  Description of Artificial Sequence: Synthetic oligonucleotide
cccgcggggccgugacugg

SEQ ID NO: 148323 - RNA, 19 nt, Artificial Sequence
  Description of Artificial Sequence: Synthetic oligonucleotide
ggcgggcuucagccaugaa

SEQ ID NO: 148324 - RNA, 19 nt, Artificial Sequence
  Description of Artificial Sequence: Synthetic oligonucleotide
agacccucauagccgccua

SEQ ID NO: 148325 - RNA, 19 nt, Artificial Sequence
  Description of Artificial Sequence: Synthetic oligonucleotide
acuccgggguccugcgcgg

SEQ ID NO: 148326 - RNA, 19 nt, Artificial Sequence
  Description of Artificial Sequence: Synthetic oligonucleotide
gcgagcgucaggccgaggc

SEQ ID NO: 148327 - RNA, 19 nt, Artificial Sequence
  Description of Artificial Sequence: Synthetic oligonucleotide
cugaccggagccagcgcuc

SEQ ID NO: 148328 - RNA, 19 nt, Artificial Sequence
  Description of Artificial Sequence: Synthetic oligonucleotide
cucacggaggaccugcgcu

SEQ ID NO: 148329 - RNA, 19 nt, Artificial Sequence
  Description of Artificial Sequence: Synthetic oligonucleotide
ugucgcgcgaggggucugg

SEQ ID NO: 148330 - RNA, 19 nt, Artificial Sequence
  Description of Artificial Sequence: Synthetic oligonucleotide
ggagauggggcacuggauc

SEQ ID NO: 148331 - RNA, 19 nt, Artificial Sequence
  Description of Artificial Sequence: Synthetic oligonucleotide
ccagcauccucuccgcccu

SEQ ID NO: 148332 - RNA, 19 nt, Artificial Sequence
  Description of Artificial Sequence: Synthetic oligonucleotide
uccaggaccucuucucugu

SEQ ID NO: 148333 - RNA, 19 nt, Artificial Sequence
  Description of Artificial Sequence: Synthetic oligonucleotide
ucaccuggcucaauagguc

SEQ ID NO: 148334 - RNA, 19 nt, Artificial Sequence
  Description of Artificial Sequence: Synthetic oligonucleotide
ccaagguggaaaagcagcu

SEQ ID NO: 148335 - RNA, 19 nt, Artificial Sequence
  Description of Artificial Sequence: Synthetic oligonucleotide
uacaggucaucucagugcu

SEQ ID NO: 148336 - RNA, 19 nt, Artificial Sequence
  Description of Artificial Sequence: Synthetic oligonucleotide
uccaguggguccuguccuu

SEQ ID NO: 148337 - RNA, 19 nt, Artificial Sequence
  Description of Artificial Sequence: Synthetic oligonucleotide
uccuuguacugggaguggc

SEQ ID NO: 148338 - RNA, 19 nt, Artificial Sequence
  Description of Artificial Sequence: Synthetic oligonucleotide
ccugcagugccauccucau

SEQ ID NO: 148339 - RNA, 19 nt, Artificial Sequence
  Description of Artificial Sequence: Synthetic oligonucleotide
uguacauauucugcacuga

SEQ ID NO: 148340 - RNA, 19 nt, Artificial Sequence
  Description of Artificial Sequence: Synthetic oligonucleotide
auugcuggcucaucgcugu

SEQ ID NO: 148341 - RNA, 19 nt, Artificial Sequence
  Description of Artificial Sequence: Synthetic oligonucleotide
ugcucuacuucacuuggcu

SEQ ID NO: 148342 - RNA, 19 nt, Artificial Sequence
  Description of Artificial Sequence: Synthetic oligonucleotide
ugguguuugacuggaacac

SEQ ID NO: 148343 - RNA, 19 nt, Artificial Sequence
  Description of Artificial Sequence: Synthetic oligonucleotide
cacccaagaaagguggcag

SEQ ID NO: 148344 - RNA, 19 nt, Artificial Sequence
  Description of Artificial Sequence: Synthetic oligonucleotide
ggaggucacaguggguccg

SEQ ID NO: 148345 - RNA, 19 nt, Artificial Sequence
  Description of Artificial Sequence: Synthetic oligonucleotide
gaaacugggcuguguggcg

SEQ ID NO: 148346 - RNA, 19 nt, Artificial Sequence
  Description of Artificial Sequence: Synthetic oligonucleotide
gcuacuuucgagacuacuu

SEQ ID NO: 148347 - RNA, 19 nt, Artificial Sequence
  Description of Artificial Sequence: Synthetic oligonucleotide
uucccauccagcuggugaa

SEQ ID NO: 148348 - RNA, 19 nt, Artificial Sequence
  Description of Artificial Sequence: Synthetic oligonucleotide
agacacacaaccugcugac

SEQ ID NO: 148349 - RNA, 19 nt, Artificial Sequence
  Description of Artificial Sequence: Synthetic oligonucleotide
ccaccaggaacuauaucuu

SEQ ID NO: 148350 - RNA, 19 nt, Artificial Sequence
  Description of Artificial Sequence: Synthetic oligonucleotide
uuggauaccacccccaugg

SEQ ID NO: 148351 - RNA, 19 nt, Artificial Sequence
  Description of Artificial Sequence: Synthetic oligonucleotide
guaucaugggccugggugc

SEQ ID NO: 148352 - RNA, 19 nt, Artificial Sequence
  Description of Artificial Sequence: Synthetic oligonucleotide
ccuucugcaacuucagcac

SEQ ID NO: 148353 - RNA, 19 nt, Artificial Sequence
  Description of Artificial Sequence: Synthetic oligonucleotide
cagaggccacagaagugag

SEQ ID NO: 148354 - RNA, 19 nt, Artificial Sequence
  Description of Artificial Sequence: Synthetic oligonucleotide
gcaagaaguucccaggcau

SEQ ID NO: 148355 - RNA, 19 nt, Artificial Sequence
  Description of Artificial Sequence: Synthetic oligonucleotide
uacggccuuaccuggcuac

SEQ ID NO: 148356 - RNA, 19 nt, Artificial Sequence
  Description of Artificial Sequence: Synthetic oligonucleotide
cacuggcaggcaacuuccg

SEQ ID NO: 148357 - RNA, 19 nt, Artificial Sequence
  Description of Artificial Sequence: Synthetic oligonucleotide
gaaugccuguguugaggga

SEQ ID NO: 148358 - RNA, 19 nt, Artificial Sequence
  Description of Artificial Sequence: Synthetic oligonucleotide
aguaccugaugucuggagg

SEQ ID NO: 148359 - RNA, 19 nt, Artificial Sequence
  Description of Artificial Sequence: Synthetic oligonucleotide
guaucugcccugucagccg

SEQ ID NO: 148360 - RNA, 19 nt, Artificial Sequence
  Description of Artificial Sequence: Synthetic oligonucleotide
gggacaccauagacuauuu

SEQ ID NO: 148361 - RNA, 19 nt, Artificial Sequence
  Description of Artificial Sequence: Synthetic oligonucleotide
ugcuuucaaagaaugggag

SEQ ID NO: 148362 - RNA, 19 nt, Artificial Sequence
  Description of Artificial Sequence: Synthetic oligonucleotide
guggcaaugcuaucaucau

SEQ ID NO: 148363 - RNA, 19 nt, Artificial Sequence
  Description of Artificial Sequence: Synthetic oligonucleotide
ucguggucgggggugcggc

SEQ ID NO: 148364 - RNA, 19 nt, Artificial Sequence
  Description of Artificial Sequence: Synthetic oligonucleotide
cugagucucugagcuccau

SEQ ID NO: 148365 - RNA, 19 nt, Artificial Sequence
  Description of Artificial Sequence: Synthetic oligonucleotide
ugccuggcaagaaugcagu

SEQ ID NO: 148366 - RNA, 19 nt, Artificial Sequence
  Description of Artificial Sequence: Synthetic oligonucleotide
ucacccugcggaaccgcaa

SEQ ID NO: 148367 - RNA, 19 nt, Artificial Sequence
  Description of Artificial Sequence: Synthetic oligonucleotide
agggcuuugugaaacuggc

SEQ ID NO: 148368 - RNA, 19 nt, Artificial Sequence
  Description of Artificial Sequence: Synthetic oligonucleotide
cccugcgucauggagcuga

SEQ ID NO: 148369 - RNA, 19 nt, Artificial Sequence
  Description of Artificial Sequence: Synthetic oligonucleotide
accugguucccaucuacuc

SEQ ID NO: 148370 - RNA, 19 nt, Artificial Sequence
  Description of Artificial Sequence: Synthetic oligonucleotide
ccuuuggagagaaugaagu

SEQ ID NO: 148371 - RNA, 19 nt, Artificial Sequence
  Description of Artificial Sequence: Synthetic oligonucleotide
uguacaagcaggugaucuu

SEQ ID NO: 148372 - RNA, 19 nt, Artificial Sequence
  Description of Artificial Sequence: Synthetic oligonucleotide
ucgaggagggcuccugggg

SEQ ID NO: 148373 - RNA, 19 nt, Artificial Sequence
  Description of Artificial Sequence: Synthetic oligonucleotide
gccgauggguccagaagaa

SEQ ID NO: 148374 - RNA, 19 nt, Artificial Sequence
  Description of Artificial Sequence: Synthetic oligonucleotide
aguuccagaaauacauugg

SEQ ID NO: 148375 - RNA, 19 nt, Artificial Sequence
  Description of Artificial Sequence: Synthetic oligonucleotide
guuucgccccaugcaucuu

SEQ ID NO: 148376 - RNA, 19 nt, Artificial Sequence
  Description of Artificial Sequence: Synthetic oligonucleotide
uccauggucgaggccucuu

SEQ ID NO: 148377 - RNA, 19 nt, Artificial Sequence
  Description of Artificial Sequence: Synthetic oligonucleotide
ucuccuccgacaccugggg

SEQ ID NO: 148378 - RNA, 19 nt, Artificial Sequence
  Description of Artificial Sequence: Synthetic oligonucleotide
ggcuggugcccuacuccaa

SEQ ID NO: 148379 - RNA, 19 nt, Artificial Sequence
  Description of Artificial Sequence: Synthetic oligonucleotide
agcccaucaccacuguugu

SEQ ID NO: 148380 - RNA, 19 nt, Artificial Sequence
  Description of Artificial Sequence: Synthetic oligonucleotide
ugggagagcccaucaccau

SEQ ID NO: 148381 - RNA, 19 nt, Artificial Sequence
  Description of Artificial Sequence: Synthetic oligonucleotide
uccccaagcuggagcaccc

SEQ ID NO: 148382 - RNA, 19 nt, Artificial Sequence
  Description of Artificial Sequence: Synthetic oligonucleotide
caacccagcaagacaucga

SEQ ID NO: 148383 - RNA, 19 nt, Artificial Sequence
  Description of Artificial Sequence: Synthetic oligonucleotide
accuguaccacaccaugua

SEQ ID NO: 148384 - RNA, 19 nt, Artificial Sequence
  Description of Artificial Sequence: Synthetic oligonucleotide
acauggaggcccuggugaa

SEQ ID NO: 148385 - RNA, 19 nt, Artificial Sequence
  Description of Artificial Sequence: Synthetic oligonucleotide
agcucuucgacaagcacaa

SEQ ID NO: 148386 - RNA, 19 nt, Artificial Sequence
  Description of Artificial Sequence: Synthetic oligonucleotide
agaccaaguucggccuccc

SEQ ID NO: 148387 - RNA, 19 nt, Artificial Sequence
  Description of Artificial Sequence: Synthetic oligonucleotide
cggagacugagguccugga

SEQ ID NO: 148388 - RNA, 19 nt, Artificial Sequence
  Description of Artificial Sequence: Synthetic oligonucleotide
aggugaacugagccagccu

SEQ ID NO: 148389 - RNA, 19 nt, Artificial Sequence
  Description of Artificial Sequence: Synthetic oligonucleotide
uucggggccaacucccugg

SEQ ID NO: 148390 - RNA, 19 nt, Artificial Sequence
  Description of Artificial Sequence: Synthetic oligonucleotide
gaggaaccagcugcaaauc

SEQ ID NO: 148391 - RNA, 19 nt, Artificial Sequence
  Description of Artificial Sequence: Synthetic oligonucleotide
cacuuuuuugcucuguaaa

SEQ ID NO: 148392 - RNA, 19 nt, Artificial Sequence
  Description of Artificial Sequence: Synthetic oligonucleotide
auuuggaagugucaugggu

SEQ ID NO: 148393 - RNA, 19 nt, Artificial Sequence
  Description of Artificial Sequence: Synthetic oligonucleotide
ugucuguggguuauuuaaa

SEQ ID NO: 148394 - RNA, 19 nt, Artificial Sequence
  Description of Artificial Sequence: Synthetic oligonucleotide
aagaaauuauaacaauuuu

SEQ ID NO: 148395 - RNA, 19 nt, Artificial Sequence
  Description of Artificial Sequence: Synthetic oligonucleotide
ugcuaaaccauuacaaugu

SEQ ID NO: 148396 - RNA, 19 nt, Artificial Sequence
  Description of Artificial Sequence: Synthetic oligonucleotide
uuaggucuuuuuuaagaag

SEQ ID NO: 148397 - RNA, 19 nt, Artificial Sequence
  Description of Artificial Sequence: Synthetic oligonucleotide
ggaaaaagucaguauuuca

SEQ ID NO: 148398 - RNA, 19 nt, Artificial Sequence
  Description of Artificial Sequence: Synthetic oligonucleotide
aaguucuuucacuuccagc

SEQ ID NO: 148399 - RNA, 19 nt, Artificial Sequence
  Description of Artificial Sequence: Synthetic oligonucleotide
cuugcccuguucuaggugg

SEQ ID NO: 148400 - RNA, 19 nt, Artificial Sequence
  Description of Artificial Sequence: Synthetic oligonucleotide
guggcuaaaucugggccua

SEQ ID NO: 148401 - RNA, 19 nt, Artificial Sequence
  Description of Artificial Sequence: Synthetic oligonucleotide
aaucuggguggcucagcua

SEQ ID NO: 148402 - RNA, 19 nt, Artificial Sequence
  Description of Artificial Sequence: Synthetic oligonucleotide
aaccucucuucuucccuuc

SEQ ID NO: 148403 - RNA, 19 nt, Artificial Sequence
  Description of Artificial Sequence: Synthetic oligonucleotide
ccugaagugacaaaggaaa

SEQ ID NO: 148404 - RNA, 19 nt, Artificial Sequence
  Description of Artificial Sequence: Synthetic oligonucleotide
acucagucuucuuggggaa

SEQ ID NO: 148405 - RNA, 19 nt, Artificial Sequence
  Description of Artificial Sequence: Synthetic oligonucleotide
agaaggauugccauuagug

SEQ ID NO: 148406 - RNA, 19 nt, Artificial Sequence
  Description of Artificial Sequence: Synthetic oligonucleotide
gacuuggaccaguuagaug

SEQ ID NO: 148407 - RNA, 19 nt, Artificial Sequence
  Description of Artificial Sequence: Synthetic oligonucleotide
gauucacuuuuugccccua

SEQ ID NO: 148408 - RNA, 19 nt, Artificial Sequence
  Description of Artificial Sequence: Synthetic oligonucleotide
agggaugagaggcgaaagc

SEQ ID NO: 148409 - RNA, 19 nt, Artificial Sequence
  Description of Artificial Sequence: Synthetic oligonucleotide
ccacuucucauacaagccc

SEQ ID NO: 148410 - RNA, 19 nt, Artificial Sequence
  Description of Artificial Sequence: Synthetic oligonucleotide
ccuuuauugccacuacccc

SEQ ID NO: 148411 - RNA, 19 nt, Artificial Sequence
  Description of Artificial Sequence: Synthetic oligonucleotide
cacgcucgucuaguccuga

SEQ ID NO: 148412 - RNA, 19 nt, Artificial Sequence
  Description of Artificial Sequence: Synthetic oligonucleotide
aaacugcaggaccaguuuc

SEQ ID NO: 148413 - RNA, 19 nt, Artificial Sequence
  Description of Artificial Sequence: Synthetic oligonucleotide
cucugccaaggggaggagu

SEQ ID NO: 148414 - RNA, 19 nt, Artificial Sequence
  Description of Artificial Sequence: Synthetic oligonucleotide
uuggagagcacaguugccc

SEQ ID NO: 148415 - RNA, 19 nt, Artificial Sequence
  Description of Artificial Sequence: Synthetic oligonucleotide
ccguugugugagggcagua

SEQ ID NO: 148416 - RNA, 19 nt, Artificial Sequence
  Description of Artificial Sequence: Synthetic oligonucleotide
aguaggcaucuggaaugcu

SEQ ID NO: 148417 - RNA, 19 nt, Artificial Sequence
  Description of Artificial Sequence: Synthetic oligonucleotide
uccaguuugaucucccuuc

SEQ ID NO: 148418 - RNA, 19 nt, Artificial Sequence
  Description of Artificial Sequence: Synthetic oligonucleotide
cugccaccccuaccucacc

SEQ ID NO: 148419 - RNA, 19 nt, Artificial Sequence
  Description of Artificial Sequence: Synthetic oligonucleotide
cccuagucacucauaucgg

SEQ ID NO: 148420 - RNA, 19 nt, Artificial Sequence
  Description of Artificial Sequence: Synthetic oligonucleotide
gagccuggacuggccucca

SEQ ID NO: 148421 - RNA, 19 nt, Artificial Sequence
  Description of Artificial Sequence: Synthetic oligonucleotide
aggaugaggaugggggugg

SEQ ID NO: 148422 - RNA, 19 nt, Artificial Sequence
  Description of Artificial Sequence: Synthetic oligonucleotide
gcaaugacacccugcaggg

SEQ ID NO: 148423 - RNA, 19 nt, Artificial Sequence
  Description of Artificial Sequence: Synthetic oligonucleotide
ggaaaggacugccccccau

SEQ ID NO: 148424 - RNA, 19 nt, Artificial Sequence
  Description of Artificial Sequence: Synthetic oligonucleotide
ugcaccauugcagggagga

SEQ ID NO: 148425 - RNA, 19 nt, Artificial Sequence
  Description of Artificial Sequence: Synthetic oligonucleotide
augccgccaccaugagcua

SEQ ID NO: 148426 - RNA, 19 nt, Artificial Sequence
  Description of Artificial Sequence: Synthetic oligonucleotide
agguggaguaacugguuuu

SEQ ID NO: 148427 - RNA, 19 nt, Artificial Sequence
  Description of Artificial Sequence: Synthetic oligonucleotide
uucuuggguggcugaugac

SEQ ID NO: 148428 - RNA, 19 nt, Artificial Sequence
  Description of Artificial Sequence: Synthetic oligonucleotide
cauggaugcagcacagacu

SEQ ID NO: 148429 - RNA, 19 nt, Artificial Sequence
  Description of Artificial Sequence: Synthetic oligonucleotide
ucagccuuggccuggagca

SEQ ID NO: 148430 - RNA, 19 nt, Artificial Sequence
  Description of Artificial Sequence: Synthetic oligonucleotide
acaugcuuacugguggccu

SEQ ID NO: 148431 - RNA, 19 nt, Artificial Sequence
  Description of Artificial Sequence: Synthetic oligonucleotide
ucaguuuaccuuccccaga

SEQ ID NO: 148432 - RNA, 19 nt, Artificial Sequence
  Description of Artificial Sequence: Synthetic oligonucleotide
auccuagauucuggaugug

SEQ ID NO: 148433 - RNA, 19 nt, Artificial Sequence
  Description of Artificial Sequence: Synthetic oligonucleotide
gaggaagagaucccucuuc

SEQ ID NO: 148434 - RNA, 19 nt, Artificial Sequence
  Description of Artificial Sequence: Synthetic oligonucleotide
cagaaggggccuggccuuc

SEQ ID NO: 148435 - RNA, 19 nt, Artificial Sequence
  Description of Artificial Sequence: Synthetic oligonucleotide
cugagcagcagauuaguuc

SEQ ID NO: 148436 - RNA, 19 nt, Artificial Sequence
  Description of Artificial Sequence: Synthetic oligonucleotide
ccaaagcagguggcccccg

SEQ ID NO: 148437 - RNA, 19 nt, Artificial Sequence
  Description of Artificial Sequence: Synthetic oligonucleotide
gaacccaagccucacuuuu

SEQ ID NO: 148438 - RNA, 19 nt, Artificial Sequence
  Description of Artificial Sequence: Synthetic oligonucleotide
ucugugccuuccugagggg

SEQ ID NO: 148439 - RNA, 19 nt, Artificial Sequence
  Description of Artificial Sequence: Synthetic oligonucleotide
gguugggccggggaggaaa

SEQ ID NO: 148440 - RNA, 19 nt, Artificial Sequence
  Description of Artificial Sequence: Synthetic oligonucleotide
acccaacccucuccugugu

SEQ ID NO: 148441 - RNA, 19 nt, Artificial Sequence
  Description of Artificial Sequence: Synthetic oligonucleotide
uguucuguuaucucuugau

SEQ ID NO: 148442 - RNA, 19 nt, Artificial Sequence
  Description of Artificial Sequence: Synthetic oligonucleotide
ugagaucauugcaccaugu

SEQ ID NO: 148443 - RNA, 19 nt, Artificial Sequence
  Description of Artificial Sequence: Synthetic oligonucleotide
ucagacuuuuguauaugcc

SEQ ID NO: 148444 - RNA, 19 nt, Artificial Sequence
  Description of Artificial Sequence: Synthetic oligonucleotide
cuugaaaauaaaugaaagu

SEQ ID NO: 148445 - RNA, 25 nt, Artificial Sequence
  Description of Artificial Sequence: Synthetic oligonucleotide
cuccgggaacgccagcgccgcggcu

SEQ ID NO: 148446 - RNA, 25 nt, Artificial Sequence
  Description of Artificial Sequence: Synthetic oligonucleotide
ugccgccucugcuggggucuaggcu

SEQ ID NO: 148447 - RNA, 25 nt, Artificial Sequence
  Description of Artificial Sequence: Synthetic oligonucleotide
uguuucucucgcgccaccacuggcc

SEQ ID NO: 148448 - RNA, 25 nt, Artificial Sequence
  Description of Artificial Sequence: Synthetic oligonucleotide
cgccggccgcagcuccagguguccu

SEQ ID NO: 148449 - RNA, 25 nt, Artificial Sequence
  Description of Artificial Sequence: Synthetic oligonucleotide
uagccgcccagccucgacgccgucc

SEQ ID NO: 148450 - RNA, 25 nt, Artificial Sequence
  Description of Artificial Sequence: Synthetic oligonucleotide
ccgggaccccugugcucugcgcgaa

SEQ ID NO: 148451 - RNA, 25 nt, Artificial Sequence
  Description of Artificial Sequence: Synthetic oligonucleotide
agcccuggccccgggggccggggca

SEQ ID NO: 148452 - RNA, 25 nt, Artificial Sequence
  Description of Artificial Sequence: Synthetic oligonucleotide
augggccaggggcgcggggugaagc

SEQ ID NO: 148453 - RNA, 25 nt, Artificial Sequence
  Description of Artificial Sequence: Synthetic oligonucleotide
cggcuucccgcggggccgugacugg

SEQ ID NO: 148454 - RNA, 25 nt, Artificial Sequence
  Description of Artificial Sequence: Synthetic oligonucleotide
ggcgggcuucagccaugaagacccu

SEQ ID NO: 148455 - RNA, 25 nt, Artificial Sequence
  Description of Artificial Sequence: Synthetic oligonucleotide
ucauagccgccuacuccgggguccu

SEQ ID NO: 148456 - RNA, 25 nt, Artificial Sequence
  Description of Artificial Sequence: Synthetic oligonucleotide
ugcgcggcgagcgucaggccgaggc

SEQ ID NO: 148457 - RNA, 25 nt, Artificial Sequence
  Description of Artificial Sequence: Synthetic oligonucleotide
cugaccggagccagcgcucucacgg

SEQ ID NO: 148458 - RNA, 25 nt, Artificial Sequence
  Description of Artificial Sequence: Synthetic oligonucleotide
gaggaccugcgcugucgcgcgaggg

SEQ ID NO: 148459 - RNA, 25 nt, Artificial Sequence
  Description of Artificial Sequence: Synthetic oligonucleotide
ggucugggagauggggcacuggauc

SEQ ID NO: 148460 - RNA, 25 nt, Artificial Sequence
  Description of Artificial Sequence: Synthetic oligonucleotide
ccagcauccucuccgcccuccagga

SEQ ID NO: 148461 - RNA, 25 nt, Artificial Sequence
  Description of Artificial Sequence: Synthetic oligonucleotide
accucuucucugucaccuggcucaa

SEQ ID NO: 148462 - RNA, 25 nt, Artificial Sequence
  Description of Artificial Sequence: Synthetic oligonucleotide
auagguccaagguggaaaagcagcu

SEQ ID NO: 148463 - RNA, 25 nt, Artificial Sequence
  Description of Artificial Sequence: Synthetic oligonucleotide
uacaggucaucucagugcuccagug

SEQ ID NO: 148464 - RNA, 25 nt, Artificial Sequence
  Description of Artificial Sequence: Synthetic oligonucleotide
ggguccuguccuuccuuguacuggg

SEQ ID NO: 148465 - RNA, 25 nt, Artificial Sequence
  Description of Artificial Sequence: Synthetic oligonucleotide
gaguggccugcagugccauccucau

SEQ ID NO: 148466 - RNA, 25 nt, Artificial Sequence
  Description of Artificial Sequence: Synthetic oligonucleotide
uguacauauucugcacugauugcug

SEQ ID NO: 148467 - RNA, 25 nt, Artificial Sequence
  Description of Artificial Sequence: Synthetic oligonucleotide
ggcucaucgcugugcucuacuucac

SEQ ID NO: 148468 - RNA, 25 nt, Artificial Sequence
  Description of Artificial Sequence: Synthetic oligonucleotide
cuuggcugguguuugacuggaacac

SEQ ID NO: 148469 - RNA, 25 nt, Artificial Sequence
  Description of Artificial Sequence: Synthetic oligonucleotide
cacccaagaaagguggcaggagguc

SEQ ID NO: 148470 - RNA, 25 nt, Artificial Sequence
  Description of Artificial Sequence: Synthetic oligonucleotide
cacaguggguccgaaacugggcugu

SEQ ID NO: 148471 - RNA, 25 nt, Artificial Sequence
  Description of Artificial Sequence: Synthetic oligonucleotide
uguggcgcuacuuucgagacuacuu

SEQ ID NO: 148472 - RNA, 25 nt, Artificial Sequence
  Description of Artificial Sequence: Synthetic oligonucleotide
uucccauccagcuggugaagacaca

SEQ ID NO: 148473 - RNA, 25 nt, Artificial Sequence
  Description of Artificial Sequence: Synthetic oligonucleotide
acaaccugcugaccaccaggaacua

SEQ ID NO: 148474 - RNA, 25 nt, Artificial Sequence
  Description of Artificial Sequence: Synthetic oligonucleotide
auaucuuuggauaccacccccaugg

SEQ ID NO: 148475 - RNA, 25 nt, Artificial Sequence
  Description of Artificial Sequence: Synthetic oligonucleotide
guaucaugggccugggugccuucug

SEQ ID NO: 148476 - RNA, 25 nt, Artificial Sequence
  Description of Artificial Sequence: Synthetic oligonucleotide
gcaacuucagcacagaggccacaga

SEQ ID NO: 148477 - RNA, 25 nt, Artificial Sequence
  Description of Artificial Sequence: Synthetic oligonucleotide
aagugagcaagaaguucccaggcau

SEQ ID NO: 148478 - RNA, 25 nt, Artificial Sequence
  Description of Artificial Sequence: Synthetic oligonucleotide
uacggccuuaccuggcuacacuggc

SEQ ID NO: 148479 - RNA, 25 nt, Artificial Sequence
  Description of Artificial Sequence: Synthetic oligonucleotide
caggcaacuuccgaaugccuguguu

SEQ ID NO: 148480 - RNA, 25 nt, Artificial Sequence
  Description of Artificial Sequence: Synthetic oligonucleotide
ugagggaguaccugaugucuggagg

SEQ ID NO: 148481 - RNA, 25 nt, Artificial Sequence
  Description of Artificial Sequence: Synthetic oligonucleotide
guaucugcccugucagccgggacac

SEQ ID NO: 148482 - RNA, 25 nt, Artificial Sequence
  Description of Artificial Sequence: Synthetic oligonucleotide
ccauagacuauuugcuuucaaagaa

SEQ ID NO: 148483 - RNA, 25 nt, Artificial Sequence
  Description of Artificial Sequence: Synthetic oligonucleotide
augggaguggcaaugcuaucaucau

SEQ ID NO: 148484 - RNA, 25 nt, Artificial Sequence
  Description of Artificial Sequence: Synthetic oligonucleotide
ucguggucgggggugcggcugaguc

SEQ ID NO: 148485 - RNA, 25 nt, Artificial Sequence
  Description of Artificial Sequence: Synthetic oligonucleotide
cucugagcuccaugccuggcaagaa

SEQ ID NO: 148486 - RNA, 25 nt, Artificial Sequence
  Description of Artificial Sequence: Synthetic oligonucleotide
augcagucacccugcggaaccgcaa

SEQ ID NO: 148487 - RNA, 25 nt, Artificial Sequence
  Description of Artificial Sequence: Synthetic oligonucleotide
agggcuuugugaaacuggcccugcg

SEQ ID NO: 148488 - RNA, 25 nt, Artificial Sequence
  Description of Artificial Sequence: Synthetic oligonucleotide
gucauggagcugaccugguucccau

SEQ ID NO: 148489 - RNA, 25 nt, Artificial Sequence
  Description of Artificial Sequence: Synthetic oligonucleotide
ucuacuccuuuggagagaaugaagu

SEQ ID NO: 148490 - RNA, 25 nt, Artificial Sequence
  Description of Artificial Sequence: Synthetic oligonucleotide
uguacaagcaggugaucuucgagga

SEQ ID NO: 148491 - RNA, 25 nt, Artificial Sequence
  Description of Artificial Sequence: Synthetic oligonucleotide
agggcuccuggggccgaugggucca

SEQ ID NO: 148492 - RNA, 25 nt, Artificial Sequence
  Description of Artificial Sequence: Synthetic oligonucleotide
agaagaaguuccagaaauacauugg

SEQ ID NO: 148493 - RNA, 25 nt, Artificial Sequence
  Description of Artificial Sequence: Synthetic oligonucleotide
guuucgccccaugcaucuuccaugg

SEQ ID NO: 148494 - RNA, 25 nt, Artificial Sequence
  Description of Artificial Sequence: Synthetic oligonucleotide
gucgaggccucuucuccuccgacac

SEQ ID NO: 148495 - RNA, 25 nt, Artificial Sequence
  Description of Artificial Sequence: Synthetic oligonucleotide
ccugggggcuggugcccuacuccaa

SEQ ID NO: 148496 - RNA, 25 nt, Artificial Sequence
  Description of Artificial Sequence: Synthetic oligonucleotide
agcccaucaccacuguugugggaga

SEQ ID NO: 148497 - RNA, 25 nt, Artificial Sequence
  Description of Artificial Sequence: Synthetic oligonucleotide
agcccaucaccauccccaagcugga

SEQ ID NO: 148498 - RNA, 25 nt, Artificial Sequence
  Description of Artificial Sequence: Synthetic oligonucleotide
agcacccaacccagcaagacaucga

SEQ ID NO: 148499 - RNA, 25 nt, Artificial Sequence
  Description of Artificial Sequence: Synthetic oligonucleotide
accuguaccacaccauguacaugga

SEQ ID NO: 148500 - RNA, 25 nt, Artificial Sequence
  Description of Artificial Sequence: Synthetic oligonucleotide
aggcccuggugaagcucuucgacaa

SEQ ID NO: 148501 - RNA, 25 nt, Artificial Sequence
  Description of Artificial Sequence: Synthetic oligonucleotide
agcacaagaccaaguucggccuccc

SEQ ID NO: 148502 - RNA, 25 nt, Artificial Sequence
  Description of Artificial Sequence: Synthetic oligonucleotide
cggagacugagguccuggaggugaa

SEQ ID NO: 148503 - RNA, 25 nt, Artificial Sequence
  Description of Artificial Sequence: Synthetic oligonucleotide
acugagccagccuucggggccaacu

SEQ ID NO: 148504 - RNA, 25 nt, Artificial Sequence
  Description of Artificial Sequence: Synthetic oligonucleotide
ucccuggaggaaccagcugcaaauc

SEQ ID NO: 148505 - RNA, 25 nt, Artificial Sequence
  Description of Artificial Sequence: Synthetic oligonucleotide
cacuuuuuugcucuguaaauuugga

SEQ ID NO: 148506 - RNA, 25 nt, Artificial Sequence
  Description of Artificial Sequence: Synthetic oligonucleotide
aagugucaugggugucuguggguua

SEQ ID NO: 148507 - RNA, 25 nt, Artificial Sequence
  Description of Artificial Sequence: Synthetic oligonucleotide
auuuaaaagaaauuauaacaauuuu

SEQ ID NO: 148508 - RNA, 25 nt, Artificial Sequence
  Description of Artificial Sequence: Synthetic oligonucleotide
ugcuaaaccauuacaauguuagguc

SEQ ID NO: 148509 - RNA, 25 nt, Artificial Sequence
  Description of Artificial Sequence: Synthetic oligonucleotide
cuuuuuuaagaaggaaaaagucagu

SEQ ID NO: 148510 - RNA, 25 nt, Artificial Sequence
  Description of Artificial Sequence: Synthetic oligonucleotide
uauuucaaguucuuucacuuccagc

SEQ ID NO: 148511 - RNA, 25 nt, Artificial Sequence
  Description of Artificial Sequence: Synthetic oligonucleotide
cuugcccuguucuaggugguggcua

SEQ ID NO: 148512 - RNA, 25 nt, Artificial Sequence
  Description of Artificial Sequence: Synthetic oligonucleotide
aaaucugggccuaaucuggguggcu

SEQ ID NO: 148513 - RNA, 25 nt, Artificial Sequence
  Description of Artificial Sequence: Synthetic oligonucleotide
ucagcuaaccucucuucuucccuuc

SEQ ID NO: 148514 - RNA, 25 nt, Artificial Sequence
  Description of Artificial Sequence: Synthetic oligonucleotide
ccugaagugacaaaggaaacucagu

SEQ ID NO: 148515 - RNA, 25 nt, Artificial Sequence
  Description of Artificial Sequence: Synthetic oligonucleotide
ucuucuuggggaagaaggauugcca

SEQ ID NO: 148516 - RNA, 25 nt, Artificial Sequence
  Description of Artificial Sequence: Synthetic oligonucleotide
auuagugacuuggaccaguuagaug

SEQ ID NO: 148517 - RNA, 25 nt, Artificial Sequence
  Description of Artificial Sequence: Synthetic oligonucleotide
gauucacuuuuugccccuagggaug

SEQ ID NO: 148518 - RNA, 25 nt, Artificial Sequence
  Description of Artificial Sequence: Synthetic oligonucleotide
gagaggcgaaagccacuucucauac

SEQ ID NO: 148519 - RNA, 25 nt, Artificial Sequence
  Description of Artificial Sequence: Synthetic oligonucleotide
caagccccuuuauugccacuacccc

SEQ ID NO: 148520 - RNA, 25 nt, Artificial Sequence
  Description of Artificial Sequence: Synthetic oligonucleotide
cacgcucgucuaguccugaaacugc

SEQ ID NO: 148521 - RNA, 25 nt, Artificial Sequence
  Description of Artificial Sequence: Synthetic oligonucleotide
caggaccaguuucucugccaagggg

SEQ ID NO: 148522 - RNA, 25 nt, Artificial Sequence
  Description of Artificial Sequence: Synthetic oligonucleotide
gaggaguuggagagcacaguugccc

SEQ ID NO: 148523 - RNA, 25 nt, Artificial Sequence
  Description of Artificial Sequence: Synthetic oligonucleotide
ccguugugugagggcaguaguaggc

SEQ ID NO: 148524 - RNA, 25 nt, Artificial Sequence
  Description of Artificial Sequence: Synthetic oligonucleotide
caucuggaaugcuccaguuugaucu

SEQ ID NO: 148525 - RNA, 25 nt, Artificial Sequence
  Description of Artificial Sequence: Synthetic oligonucleotide
ucccuucugccaccccuaccucacc

SEQ ID NO: 148526 - RNA, 25 nt, Artificial Sequence
  Description of Artificial Sequence: Synthetic oligonucleotide
cccuagucacucauaucggagccug

SEQ ID NO: 148527 - RNA, 25 nt, Artificial Sequence
  Description of Artificial Sequence: Synthetic oligonucleotide
ggacuggccuccaggaugaggaugg

SEQ ID NO: 148528 - RNA, 25 nt, Artificial Sequence
  Description of Artificial Sequence: Synthetic oligonucleotide
gggguggcaaugacacccugcaggg

SEQ ID NO: 148529 - RNA, 25 nt, Artificial Sequence
  Description of Artificial Sequence: Synthetic oligonucleotide
ggaaaggacugccccccaugcacca

SEQ ID NO: 148530 - RNA, 25 nt, Artificial Sequence
  Description of Artificial Sequence: Synthetic oligonucleotide
auugcagggaggaugccgccaccau

SEQ ID NO: 148531 - RNA, 25 nt, Artificial Sequence
  Description of Artificial Sequence: Synthetic oligonucleotide
ugagcuagguggaguaacugguuuu

SEQ ID NO: 148532 - RNA, 25 nt, Artificial Sequence
  Description of Artificial Sequence: Synthetic oligonucleotide
uucuuggguggcugaugacauggau

SEQ ID NO: 148533 - RNA, 25 nt, Artificial Sequence
  Description of Artificial Sequence: Synthetic oligonucleotide
ugcagcacagacucagccuuggccu

SEQ ID NO: 148534 - RNA, 25 nt, Artificial Sequence
  Description of Artificial Sequence: Synthetic oligonucleotide
uggagcacaugcuuacugguggccu

SEQ ID NO: 148535 - RNA, 25 nt, Artificial Sequence
  Description of Artificial Sequence: Synthetic oligonucleotide
ucaguuuaccuuccccagauccuag

SEQ ID NO: 148536 - RNA, 25 nt, Artificial Sequence
  Description of Artificial Sequence: Synthetic oligonucleotide
gauucuggaugugaggaagagaucc

SEQ ID NO: 148537 - RNA, 25 nt, Artificial Sequence
  Description of Artificial Sequence: Synthetic oligonucleotide
ccucuucagaaggggccuggccuuc

SEQ ID NO: 148538 - RNA, 25 nt, Artificial Sequence
  Description of Artificial Sequence: Synthetic oligonucleotide
cugagcagcagauuaguuccaaagc

SEQ ID NO: 148539 - RNA, 25 nt, Artificial Sequence
  Description of Artificial Sequence: Synthetic oligonucleotide
cagguggcccccgaacccaagccuc

SEQ ID NO: 148540 - RNA, 25 nt, Artificial Sequence
  Description of Artificial Sequence: Synthetic oligonucleotide
cacuuuucugugccuuccugagggg

SEQ ID NO: 148541 - RNA, 25 nt, Artificial Sequence
  Description of Artificial Sequence: Synthetic oligonucleotide
gguugggccggggaggaaacccaac

SEQ ID NO: 148542 - RNA, 25 nt, Artificial Sequence
  Description of Artificial Sequence: Synthetic oligonucleotide
cccucuccuguguguucuguuaucu

SEQ ID NO: 148543 - RNA, 25 nt, Artificial Sequence
  Description of Artificial Sequence: Synthetic oligonucleotide
ucuugaugagaucauugcaccaugu

SEQ ID NO: 148544 - RNA, 25 nt, Artificial Sequence
  Description of Artificial Sequence: Synthetic oligonucleotide
ucagacuuuuguauaugccuugaaa

SEQ ID NO: 148545 - RNA, 25 nt, Artificial Sequence
  Description of Artificial Sequence: Synthetic oligonucleotide
aauaaaugaaagugagaauccaaaa

SEQ ID NO: 148546 - DNA, 21 bp, Artificial Sequence
  Description of Artificial Sequence: Synthetic oligonucleotide
  Description of Combined DNA/RNA Molecule: Synthetic oligonucleotide
cuacacaaaucagcgauuutt

SEQ ID NO: 148547 - DNA, 21 bp, Artificial Sequence
  Description of Artificial Sequence: Synthetic oligonucleotide
  Description of Combined DNA/RNA Molecule: Synthetic oligonucleotide
aaaucgcugauuuguguagtt

SEQ ID NO: 148548 - DNA, 25 bp, Artificial Sequence
  Description of Artificial Sequence: Synthetic oligonucleotide
  Description of Combined DNA/RNA Molecule: Synthetic oligonucleotide
cuacacaaaucagcgauuuccaugt

SEQ ID NO: 148549 - RNA, 27 nt, Artificial Sequence
  Description of Artificial Sequence: Synthetic oligonucleotide
acauggaaaucgcugauuuguguaguc

SEQ ID NO: 148550 - RNA, 13 nt, Artificial Sequence
  Description of Artificial Sequence: Synthetic oligonucleotide
cuacacaaaucag

SEQ ID NO: 148551 - DNA, 11 bp, Artificial Sequence
  Description of Artificial Sequence: Synthetic oligonucleotide
  Description of Combined DNA/RNA Molecule: Synthetic oligonucleotide
gauuuccaugt

SEQ ID NO: 148552 - DNA, 21 bp, Artificial Sequence
  Description of Artificial Sequence: Synthetic oligonucleotide
  Description of Combined DNA/RNA Molecule: Synthetic oligonucleotide
ggaucuuauuucuucggagtt

SEQ ID NO: 148553 - DNA, 21 bp, Artificial Sequence
  Description of Artificial Sequence: Synthetic oligonucleotide
  Description of Combined DNA/RNA Molecule: Synthetic oligonucleotide
cuccgaagaaauaagaucctt

SEQ ID NO: 148554 - RNA, 11 nt, Artificial Sequence
  Description of Artificial Sequence: Synthetic oligonucleotide
ggaucuuauuu

SEQ ID NO: 148555 - DNA, 10 bp, Artificial Sequence
  Description of Artificial Sequence: Synthetic oligonucleotide
  Description of Combined DNA/RNA Molecule: Synthetic oligonucleotide
cuucggagtt

SEQ ID NO: 148556 - RNA, 27 nt, Artificial Sequence
  Description of Artificial Sequence: Synthetic oligonucleotide
cauugucuccgaagaaauaagauccuu

SEQ ID NO: 148557 - RNA, 8 nt, Artificial Sequence
  Description of Artificial Sequence: Synthetic oligonucleotide
  modified_base (2): LNA-G
ggaucuua

SEQ ID NO: 148558 - DNA, 17 bp, Artificial Sequence
  Description of Artificial Sequence: Synthetic oligonucleotide
  Description of Combined DNA/RNA Molecule: Synthetic oligonucleotide
uuucuucggagacaatg

SEQ ID NO: 148559 - DNA, 16 bp, Artificial Sequence
  Description of Artificial Sequence: Synthetic oligonucleotide
  Description of Combined DNA/RNA Molecule: Synthetic oligonucleotide
uucuucggagacaatg

SEQ ID NO: 148560 - DNA, 15 bp, Artificial Sequence
  Description of Artificial Sequence: Synthetic oligonucleotide
  Description of Combined DNA/RNA Molecule: Synthetic oligonucleotide
ucuucggagacaatg

SEQ ID NO: 148561 - DNA, 14 bp, Artificial Sequence
  Description of Artificial Sequence: Synthetic oligonucleotide
  Description of Combined DNA/RNA Molecule: Synthetic oligonucleotide
cuucggagacaatg

SEQ ID NO: 148562 - DNA, 13 bp, Artificial Sequence
  Description of Artificial Sequence: Synthetic oligonucleotide
  Description of Combined DNA/RNA Molecule: Synthetic oligonucleotide
uucggagacaatg

SEQ ID NO: 148563 - DNA, 12 bp, Artificial Sequence
  Description of Artificial Sequence: Synthetic oligonucleotide
  Description of Combined DNA/RNA Molecule: Synthetic oligonucleotide
ucggagacaatg

SEQ ID NO: 148564 - DNA, 11 bp, Artificial Sequence
  Description of Artificial Sequence: Synthetic oligonucleotide
  Description of Combined DNA/RNA Molecule: Synthetic oligonucleotide
cggagacaatg

SEQ ID NO: 148565 - RNA, 9 nt, Artificial Sequence
  Description of Artificial Sequence: Synthetic oligonucleotide
  modified_base (2): LNA-G
ggaucuuau

SEQ ID NO: 148566 - RNA, 10 nt, Artificial Sequence
  Description of Artificial Sequence: Synthetic oligonucleotide
  modified_base (2): LNA-G
ggaucuuauu

SEQ ID NO: 148567 - RNA, 11 nt, Artificial Sequence
  Description of Artificial Sequence: Synthetic oligonucleotide
  modified_base (2): LNA-G
ggaucuuauuu

SEQ ID NO: 148568 - RNA, 12 nt, Artificial Sequence
  Description of Artificial Sequence: Synthetic oligonucleotide
  modified_base (2): LNA-G
ggaucuuauuuc

SEQ ID NO: 148569 - RNA, 8 nt, Artificial Sequence
  Description of Artificial Sequence: Synthetic oligonucleotide
  modified_base (3): LNA-A
cuacacaa

SEQ ID NO: 148570 - DNA, 13 bp, Artificial Sequence
  Description of Artificial Sequence: Synthetic oligonucleotide
  Description of Combined DNA/RNA Molecule: Synthetic oligonucleotide
  modified_base (8): LNA-A
aucagcgauuutt

SEQ ID NO: 148571 - DNA, 12 bp, Artificial Sequence
  Description of Artificial Sequence: Synthetic oligonucleotide
  Description of Combined DNA/RNA Molecule: Synthetic oligonucleotide
  modified_base (7): LNA-A
ucagcgauuutt

SEQ ID NO: 148572 - DNA, 11 bp, Artificial Sequence
  Description of Artificial Sequence: Synthetic oligonucleotide
  Description of Combined DNA/RNA Molecule: Synthetic oligonucleotide
  modified_base (6): LNA-A
cagcgauuutt

SEQ ID NO: 148573 - DNA, 10 bp, Artificial Sequence
  Description of Artificial Sequence: Synthetic oligonucleotide
  Description of Combined DNA/RNA Molecule: Synthetic oligonucleotide
  modified_base (5): LNA-A
agcgauuutt

SEQ ID NO: 148574 - DNA, 9 bp, Artificial Sequence
  Description of Artificial Sequence: Synthetic oligonucleotide
  Description of Combined DNA/RNA Molecule: Synthetic oligonucleotide
  modified_base (4): LNA-A
gcgauuutt

SEQ ID NO: 148575 - DNA, 8 bp, Artificial Sequence
  Description of Artificial Sequence: Synthetic oligonucleotide
  Description of Combined DNA/RNA Molecule: Synthetic oligonucleotide
  modified_base (3): LNA-A
cgauuutt

SEQ ID NO: 148576 - DNA, 7 bp, Artificial Sequence
  Description of Artificial Sequence: Synthetic oligonucleotide
  Description of Combined DNA/RNA Molecule: Synthetic oligonucleotide
  modified_base (2): LNA-A
gauuutt

SEQ ID NO: 148577 - RNA, 9 nt, Artificial Sequence
  Description of Artificial Sequence: Synthetic oligonucleotide
  modified_base (3): LNA-A
cuacacaaa

SEQ ID NO: 148578 - RNA, 10 nt, Artificial Sequence
  Description of Artificial Sequence: Synthetic oligonucleotide
  modified_base (3): LNA-A
cuacacaaau

SEQ ID NO: 148579 - RNA, 11 nt, Artificial Sequence
  Description of Artificial Sequence: Synthetic oligonucleotide
  modified_base (3): LNA-A
cuacacaaauc

SEQ ID NO: 148580 - RNA, 12 nt, Artificial Sequence
  Description of Artificial Sequence: Synthetic oligonucleotide
  modified_base (3): LNA-A
cuacacaaauca

SEQ ID NO: 148581 - RNA, 13 nt, Artificial Sequence
  Description of Artificial Sequence: Synthetic oligonucleotide
  modified_base (3): LNA-A
cuacacaaaucag

SEQ ID NO: 148582 - RNA, 14 nt, Artificial Sequence
  Description of Artificial Sequence: Synthetic oligonucleotide
  modified_base (3): LNA-A
cuacacaaaucagc

SEQ ID NO: 148583 - RNA, 13 nt, Artificial Sequence
  Description of Artificial Sequence: Synthetic oligonucleotide
  modified_base (2): LNA-G
ggaucuuauuucu

SEQ ID NO: 148584 - RNA, 14 nt, Artificial Sequence
  Description of Artificial Sequence: Synthetic oligonucleotide
  modified_base (2): LNA-G
ggaucuuauuucuu

SEQ ID NO: 148585 - RNA, 8 nt, Artificial Sequence
  Description of Artificial Sequence: Synthetic oligonucleotide
  modified_base (2): LNA-G
  modified_base (8): LNA-A
ggaucuua

SEQ ID NO: 148586 - RNA, 9 nt, Artificial Sequence
  Description of Artificial Sequence: Synthetic oligonucleotide
  modified_base (2): LNA-G
  modified_base (9): LNA-U
ggaucuuau

SEQ ID NO: 148587 - RNA, 10 nt, Artificial Sequence
  Description of Artificial Sequence: Synthetic oligonucleotide
  modified_base (2): LNA-G
  modified_base (10): LNA-U
ggaucuuauu

SEQ ID NO: 148588 - RNA, 11 nt, Artificial Sequence
  Description of Artificial Sequence: Synthetic oligonucleotide
  modified_base (2): LNA-G
  modified_base (11): LNA-U
ggaucuuauuu

SEQ ID NO: 148589 - RNA, 12 nt, Artificial Sequence
  Description of Artificial Sequence: Synthetic oligonucleotide
  modified_base (2): LNA-G
  modified_base (12): LNA-C
ggaucuuauuuc

SEQ ID NO: 148590 - RNA, 13 nt, Artificial Sequence
  Description of Artificial Sequence: Synthetic oligonucleotide
  modified_base (2): LNA-G
  modified_base (13): LNA-U
ggaucuuauuucu

SEQ ID NO: 148591 - RNA, 14 nt, Artificial Sequence
  Description of Artificial Sequence: Synthetic oligonucleotide
  modified_base (2): LNA-G
  modified_base (14): LNA-U
ggaucuuauuucuu

SEQ ID NO: 148592 - DNA, 13 bp, Artificial Sequence
  Description of Artificial Sequence: Synthetic oligonucleotide
  Description of Combined DNA/RNA Molecule: Synthetic oligonucleotide
  modified_base (8): LNA-G
uuucuucggagtt

SEQ ID NO: 148593 - DNA, 12 bp, Artificial Sequence
  Description of Artificial Sequence: Synthetic oligonucleotide
  Description of Combined DNA/RNA Molecule: Synthetic oligonucleotide
  modified_base (7): LNA-G
uucuucggagtt

SEQ ID NO: 148594 - DNA, 11 bp, Artificial Sequence
  Description of Artificial Sequence: Synthetic oligonucleotide
  Description of Combined DNA/RNA Molecule: Synthetic oligonucleotide
  modified_base (6): LNA-G
ucuucggagtt

SEQ ID NO: 148595 - DNA, 10 bp, Artificial Sequence
  Description of Artificial Sequence: Synthetic oligonucleotide
  Description of Combined DNA/RNA Molecule: Synthetic oligonucleotide
  modified_base (5): LNA-G
cuucggagtt

SEQ ID NO: 148596 - DNA, 9 bp, Artificial Sequence
  Description of Artificial Sequence: Synthetic oligonucleotide
  Description of Combined DNA/RNA Molecule: Synthetic oligonucleotide
  modified_base (4): LNA-G
uucggagtt

SEQ ID NO: 148597 - DNA, 8 bp, Artificial Sequence
  Description of Artificial Sequence: Synthetic oligonucleotide
  Description of Combined DNA/RNA Molecule: Synthetic oligonucleotide
  modified_base (3): LNA-G
ucggagtt

SEQ ID NO: 148598 - DNA, 7 bp, Artificial Sequence
  Description of Artificial Sequence: Synthetic oligonucleotide
  Description of Combined DNA/RNA Molecule: Synthetic oligonucleotide
  modified_base (2): LNA-G
cggagtt

SEQ ID NO: 148599 - DNA, 13 bp, Artificial Sequence
  Description of Artificial Sequence: Synthetic oligonucleotide
  Description of Combined DNA/RNA Molecule: Synthetic oligonucleotide
  modified_base (1): LNA-U
  modified_base (8): LNA-G
uuucuucggagtt

SEQ ID NO: 148600 - DNA, 12 bp, Artificial Sequence
  Description of Artificial Sequence: Synthetic oligonucleotide
  Description of Combined DNA/RNA Molecule: Synthetic oligonucleotide
  modified_base (1): LNA-U
  modified_base (7): LNA-G
uucuucggagtt

SEQ ID NO: 148601 - DNA, 11 bp, Artificial Sequence
  Description of Artificial Sequence: Synthetic oligonucleotide
  Description of Combined DNA/RNA Molecule: Synthetic oligonucleotide
  modified_base (1): LNA-U
  modified_base (6): LNA-G
ucuucggagtt

SEQ ID NO: 148602 - DNA, 10 bp, Artificial Sequence
  Description of Artificial Sequence: Synthetic oligonucleotide
  Description of Combined DNA/RNA Molecule: Synthetic oligonucleotide
  modified_base (1): LNA-C
  modified_base (5): LNA-G
cuucggagtt

SEQ ID NO: 148603 - DNA, 9 bp, Artificial Sequence
  Description of Artificial Sequence: Synthetic oligonucleotide
  Description of Combined DNA/RNA Molecule: Synthetic oligonucleotide
  modified_base (1): LNA-U
  modified_base (4): LNA-G
uucggagtt

SEQ ID NO: 148604 - DNA, 8 bp, Artificial Sequence
  Description of Artificial Sequence: Synthetic oligonucleotide
  Description of Combined DNA/RNA Molecule: Synthetic oligonucleotide
  modified_base (1): LNA-U
  modified_base (3): LNA-G
ucggagtt

SEQ ID NO: 148605 - DNA, 7 bp, Artificial Sequence
  Description of Artificial Sequence: Synthetic oligonucleotide
  Description of Combined DNA/RNA Molecule: Synthetic oligonucleotide
  modified_base (1): LNA-C
  modified_base (2): LNA-G
cggagtt

SEQ ID NO: 148606 - DNA, 21 bp, Artificial Sequence
  Description of Artificial Sequence: Synthetic oligonucleotide
  Description of Combined DNA/RNA Molecule: Synthetic oligonucleotide
  modified_base (2): LNA-G
  modified_base (16): LNA-G
ggaucuuauuucuucggagtt

SEQ ID NO: 148607 - DNA, 25 bp, Artificial Sequence
  Description of Artificial Sequence: Synthetic oligonucleotide
  Description of Combined DNA/RNA Molecule: Synthetic oligonucleotide
ggaucuuauuucuucggagacaatg

SEQ ID NO: 148608 - RNA, 25 nt, Artificial Sequence
  Description of Artificial Sequence: Synthetic oligonucleotide
guauuuugaugaggaguucacggcc

SEQ ID NO: 148609 - RNA, 25 nt, Artificial Sequence
  Description of Artificial Sequence: Synthetic oligonucleotide
ggcccagaugaucaccaucacacca

SEQ ID NO: 148610 - RNA, 25 nt, Artificial Sequence
  Description of Artificial Sequence: Synthetic oligonucleotide
gggaagaaaacuauccugcggguuu

SEQ ID NO: 148611 - RNA, 25 nt, Artificial Sequence
  Description of Artificial Sequence: Synthetic oligonucleotide
guuuuaauuuauuucauccaguuug

SEQ ID NO: 148612 - RNA, 25 nt, Artificial Sequence
  Description of Artificial Sequence: Synthetic oligonucleotide
acguagggaaauguuaaggacuucu

SEQ ID NO: 148613 - RNA, 25 nt, Artificial Sequence
  Description of Artificial Sequence: Synthetic oligonucleotide
ccaggguuuacccagugggacagag

SEQ ID NO: 148614 - RNA, 25 nt, Artificial Sequence
  Description of Artificial Sequence: Synthetic oligonucleotide
agcaagguuuaaauuuguuauugug

SEQ ID NO: 148615 - RNA, 25 nt, Artificial Sequence
  Description of Artificial Sequence: Synthetic oligonucleotide
uguauuauguuguucaaaugcauuu

SEQ ID NO: 148616 - RNA, 25 nt, Artificial Sequence
  Description of Artificial Sequence: Synthetic oligonucleotide
uuuuaaucuuugugacaggaaagcc

SEQ ID NO: 148617 - RNA, 25 nt, Artificial Sequence
  Description of Artificial Sequence: Synthetic oligonucleotide
uuaaucuuugugacaggaaagcccu

SEQ ID NO: 148618 - RNA, 25 nt, Artificial Sequence
  Description of Artificial Sequence: Synthetic oligonucleotide
gcugcuuaugucucccagcauggcc

SEQ ID NO: 148619 - RNA, 25 nt, Artificial Sequence
  Description of Artificial Sequence: Synthetic oligonucleotide
aaguguuucagaagcuucucccuga

SEQ ID NO: 148620 - RNA, 25 nt, Artificial Sequence
  Description of Artificial Sequence: Synthetic oligonucleotide
gaccaucaauaaggaagaagcccuu

SEQ ID NO: 148621 - RNA, 25 nt, Artificial Sequence
  Description of Artificial Sequence: Synthetic oligonucleotide
ccaucaauaaggaagaagcccuuca

SEQ ID NO: 148622 - RNA, 25 nt, Artificial Sequence
  Description of Artificial Sequence: Synthetic oligonucleotide
ucaauaaggaagaagcccuucagcg

SEQ ID NO: 148623 - RNA, 25 nt, Artificial Sequence
  Description of Artificial Sequence: Synthetic oligonucleotide
aauaaggaagaagcccuucagcggc

SEQ ID NO: 148624 - RNA, 25 nt, Artificial Sequence
  Description of Artificial Sequence: Synthetic oligonucleotide
aggaagaagcccuucagcggccagu

SEQ ID NO: 148625 - RNA, 25 nt, Artificial Sequence
  Description of Artificial Sequence: Synthetic oligonucleotide
gcauaacuaaaggugaaaagcuccg

SEQ ID NO: 148626 - RNA, 25 nt, Artificial Sequence
  Description of Artificial Sequence: Synthetic oligonucleotide
cauaacuaaaggugaaaagcuccgg

SEQ ID NO: 148627 - RNA, 25 nt, Artificial Sequence
  Description of Artificial Sequence: Synthetic oligonucleotide
cuacaucacgccagucaacagucug

SEQ ID NO: 148628 - RNA, 25 nt, Artificial Sequence
  Description of Artificial Sequence: Synthetic oligonucleotide
acuggauuuaagcagaguucaaaag

SEQ ID NO: 148629 - RNA, 25 nt, Artificial Sequence
  Description of Artificial Sequence: Synthetic oligonucleotide
cuggauuuaagcagaguucaaaagc

SEQ ID NO: 148630 - RNA, 25 nt, Artificial Sequence
  Description of Artificial Sequence: Synthetic oligonucleotide
gauuuaagcagaguucaaaagcccu

SEQ ID NO: 148631 - RNA, 25 nt, Artificial Sequence
  Description of Artificial Sequence: Synthetic oligonucleotide
auuuaagcagaguucaaaagcccuu

SEQ ID NO: 148632 - RNA, 25 nt, Artificial Sequence
  Description of Artificial Sequence: Synthetic oligonucleotide
uuaagcagaguucaaaagcccuuca

SEQ ID NO: 148633 - RNA, 25 nt, Artificial Sequence
  Description of Artificial Sequence: Synthetic oligonucleotide
uaagcagaguucaaaagcccuucag

SEQ ID NO: 148634 - RNA, 25 nt, Artificial Sequence
  Description of Artificial Sequence: Synthetic oligonucleotide
agcagaguucaaaagcccuucagcg

SEQ ID NO: 148635 - RNA, 25 nt, Artificial Sequence
  Description of Artificial Sequence: Synthetic oligonucleotide
cucagggucugagugaagccgcucg

SEQ ID NO: 148636 - RNA, 25 nt, Artificial Sequence
  Description of Artificial Sequence: Synthetic oligonucleotide
caagcaacuacaucacgccagucaa

SEQ ID NO: 148637 - RNA, 25 nt, Artificial Sequence
  Description of Artificial Sequence: Synthetic oligonucleotide
aucaauggcagcuucuuggugcgug

SEQ ID NO: 148638 - RNA, 25 nt, Artificial Sequence
  Description of Artificial Sequence: Synthetic oligonucleotide
uuccagcccacauuggauucaucag

SEQ ID NO: 148639 - RNA, 25 nt, Artificial Sequence
  Description of Artificial Sequence: Synthetic oligonucleotide
cagcugagaauguggaauaccuaag

SEQ ID NO: 148640 - RNA, 25 nt, Artificial Sequence
  Description of Artificial Sequence: Synthetic oligonucleotide
aacguaucuccuaauuugaggcuca

SEQ ID NO: 148641 - RNA, 25 nt, Artificial Sequence
  Description of Artificial Sequence: Synthetic oligonucleotide
ccuaaaauaauuucucuacaauugg

SEQ ID NO: 148642 - RNA, 25 nt, Artificial Sequence
  Description of Artificial Sequence: Synthetic oligonucleotide
uggaagauucagcuaguuaggagcc

SEQ ID NO: 148643 - RNA, 25 nt, Artificial Sequence
  Description of Artificial Sequence: Synthetic oligonucleotide
uuaaacucuccuagucaauauccac

SEQ ID NO: 148644 - RNA, 25 nt, Artificial Sequence
  Description of Artificial Sequence: Synthetic oligonucleotide
cagccuacaguuauguucagucaca

SEQ ID NO: 148645 - RNA, 25 nt, Artificial Sequence
  Description of Artificial Sequence: Synthetic oligonucleotide
guuauguucagucacacacacauac

SEQ ID NO: 148646 - RNA, 25 nt, Artificial Sequence
  Description of Artificial Sequence: Synthetic oligonucleotide
cacauacaaaauguuccuuuugcuu

SEQ ID NO: 148647 - RNA, 25 nt, Artificial Sequence
  Description of Artificial Sequence: Synthetic oligonucleotide
uccuuuugcuuuuaaaguaauuuuu

SEQ ID NO: 148648 - RNA, 25 nt, Artificial Sequence
  Description of Artificial Sequence: Synthetic oligonucleotide
ugaccugugaagcaacagucaaugg

SEQ ID NO: 148649 - RNA, 25 nt, Artificial Sequence
  Description of Artificial Sequence: Synthetic oligonucleotide
cuaucucacacaucgacaaaccaau

SEQ ID NO: 148650 - RNA, 25 nt, Artificial Sequence
  Description of Artificial Sequence: Synthetic oligonucleotide
uguccucaauuguacugcuaccacu

SEQ ID NO: 148651 - RNA, 25 nt, Artificial Sequence
  Description of Artificial Sequence: Synthetic oligonucleotide
aaaccguagcuggcaagcggucuua

SEQ ID NO: 148652 - RNA, 25 nt, Artificial Sequence
  Description of Artificial Sequence: Synthetic oligonucleotide
uagcuggcaagcggucuuaccggcu

SEQ ID NO: 148653 - RNA, 25 nt, Artificial Sequence
  Description of Artificial Sequence: Synthetic oligonucleotide
uuguaugguuaaaagauggguuacc

SEQ ID NO: 148654 - RNA, 25 nt, Artificial Sequence
  Description of Artificial Sequence: Synthetic oligonucleotide
ugguuaaaagauggguuaccugcga

SEQ ID NO: 148655 - RNA, 25 nt, Artificial Sequence
  Description of Artificial Sequence: Synthetic oligonucleotide
cagggaauuauacaaucuugcugag

SEQ ID NO: 148656 - RNA, 25 nt, Artificial Sequence
  Description of Artificial Sequence: Synthetic oligonucleotide
acaaucuugcugagcauaaaacagu

SEQ ID NO: 148657 - RNA, 25 nt, Artificial Sequence
  Description of Artificial Sequence: Synthetic oligonucleotide
ccaauaaugaagaguccuuuauccu

SEQ ID NO: 148658 - RNA, 25 nt, Artificial Sequence
  Description of Artificial Sequence: Synthetic oligonucleotide
acuuuggauguuccaacgcaaguug

SEQ ID NO: 148659 - RNA, 25 nt, Artificial Sequence
  Description of Artificial Sequence: Synthetic oligonucleotide
aaugcuuccacuaaacugaaaccau

SEQ ID NO: 148660 - RNA, 25 nt, Artificial Sequence
  Description of Artificial Sequence: Synthetic oligonucleotide
gagaaaguuugacuuuguuaaauau

SEQ ID NO: 148661 - RNA, 25 nt, Artificial Sequence
  Description of Artificial Sequence: Synthetic oligonucleotide
aaagaacuacuguauauuaaaaguu

SEQ ID NO: 148662 - RNA, 25 nt, Artificial Sequence
  Description of Artificial Sequence: Synthetic oligonucleotide
uuagaaauacggguuuugacuuaac

SEQ ID NO: 148663 - RNA, 25 nt, Artificial Sequence
  Description of Artificial Sequence: Synthetic oligonucleotide
aacauggguacagcaaacucagcac

SEQ ID NO: 148664 - RNA, 25 nt, Artificial Sequence
  Description of Artificial Sequence: Synthetic oligonucleotide
aaagacacagaagaugcugaccuca

SEQ ID NO: 148665 - RNA, 25 nt, Artificial Sequence
  Description of Artificial Sequence: Synthetic oligonucleotide
uaguagggagguuuauucagaucgc

SEQ ID NO: 148666 - RNA, 25 nt, Artificial Sequence
  Description of Artificial Sequence: Synthetic oligonucleotide
gccuucugcagcaggguucugggau

SEQ ID NO: 148667 - RNA, 25 nt, Artificial Sequence
  Description of Artificial Sequence: Synthetic oligonucleotide
ggucugguacauauuggaaauuaug

SEQ ID NO: 148668 - RNA, 25 nt, Artificial Sequence
  Description of Artificial Sequence: Synthetic oligonucleotide
cuaguccuuccgauggaagcacuag

SEQ ID NO: 148669 - RNA, 25 nt, Artificial Sequence
  Description of Artificial Sequence: Synthetic oligonucleotide
ccagugaauauuguuuuuaugugga

SEQ ID NO: 148670 - RNA, 25 nt, Artificial Sequence
  Description of Artificial Sequence: Synthetic oligonucleotide
augaauucaaguuggaauugguaga

SEQ ID NO: 148671 - RNA, 25 nt, Artificial Sequence
  Description of Artificial Sequence: Synthetic oligonucleotide
caggacacagauuuagacuuggaga

SEQ ID NO: 148672 - RNA, 25 nt, Artificial Sequence
  Description of Artificial Sequence: Synthetic oligonucleotide
cucaaagcacaguuacaguauucca

SEQ ID NO: 148673 - RNA, 25 nt, Artificial Sequence
  Description of Artificial Sequence: Synthetic oligonucleotide
accacugccaccacugaugaauuaa

SEQ ID NO: 148674 - RNA, 25 nt, Artificial Sequence
  Description of Artificial Sequence: Synthetic oligonucleotide
gaaacuacuagugccacaucaucac

SEQ ID NO: 148675 - RNA, 25 nt, Artificial Sequence
  Description of Artificial Sequence: Synthetic oligonucleotide
aagucggacagccucaccaaacaga

SEQ ID NO: 148676 - RNA, 25 nt, Artificial Sequence
  Description of Artificial Sequence: Synthetic oligonucleotide
gaaagcgaaaaauggaacaugaugg

SEQ ID NO: 148677 - RNA, 25 nt, Artificial Sequence
  Description of Artificial Sequence: Synthetic oligonucleotide
cccucugauuuagcauguagacugc

SEQ ID NO: 148678 - RNA, 25 nt, Artificial Sequence
  Description of Artificial Sequence: Synthetic oligonucleotide
ugagcuauuuaaggaucuauuuaug

SEQ ID NO: 148679 - RNA, 25 nt, Artificial Sequence
  Description of Artificial Sequence: Synthetic oligonucleotide
aaaaggugaaaaagcacuauuauca

SEQ ID NO: 148680 - RNA, 25 nt, Artificial Sequence
  Description of Artificial Sequence: Synthetic oligonucleotide
gaaaaagcacuauuaucaguucugc

SEQ ID NO: 148681 - RNA, 25 nt, Artificial Sequence
  Description of Artificial Sequence: Synthetic oligonucleotide
ggcugaaaagaaagauuaaaccuac

SEQ ID NO: 148682 - RNA, 25 nt, Artificial Sequence
  Description of Artificial Sequence: Synthetic oligonucleotide
uaaacccuuauaauaaaauccuucu

SEQ ID NO: 148683 - RNA, 25 nt, Artificial Sequence
  Description of Artificial Sequence: Synthetic oligonucleotide
cauacuauuagccaaugcuguagac

SEQ ID NO: 148684 - RNA, 25 nt, Artificial Sequence
  Description of Artificial Sequence: Synthetic oligonucleotide
gacagaagcauuuugauaggaauag

SEQ ID NO: 148685 - RNA, 25 nt, Artificial Sequence
  Description of Artificial Sequence: Synthetic oligonucleotide
agagcaaauaagauaauggcccuga

SEQ ID NO: 148686 - RNA, 25 nt, Artificial Sequence
  Description of Artificial Sequence: Synthetic oligonucleotide
ccaacauuuuucucuuccucaagca

SEQ ID NO: 148687 - RNA, 25 nt, Artificial Sequence
  Description of Artificial Sequence: Synthetic oligonucleotide
uuaaguaugagaaaaguucagccca

SEQ ID NO: 148688 - RNA, 25 nt, Artificial Sequence
  Description of Artificial Sequence: Synthetic oligonucleotide
caggaauaaagauggcugcugaacc

SEQ ID NO: 148689 - RNA, 25 nt, Artificial Sequence
  Description of Artificial Sequence: Synthetic oligonucleotide
aauuugaaugaccaaguucucuuca

SEQ ID NO: 148690 - RNA, 25 nt, Artificial Sequence
  Description of Artificial Sequence: Synthetic oligonucleotide
auguauaaagauagccagccuagag

SEQ ID NO: 148691 - RNA, 25 nt, Artificial Sequence
  Description of Artificial Sequence: Synthetic oligonucleotide
ggcuguaacuaucucugugaagugu

SEQ ID NO: 148692 - RNA, 25 nt, Artificial Sequence
  Description of Artificial Sequence: Synthetic oligonucleotide
ucugugaagugugagaaaauuucaa

SEQ ID NO: 148693 - RNA, 25 nt, Artificial Sequence
  Description of Artificial Sequence: Synthetic oligonucleotide
ccuuuaaggaaaugaauccuccuga

SEQ ID NO: 148694 - RNA, 25 nt, Artificial Sequence
  Description of Artificial Sequence: Synthetic oligonucleotide
aaggauacaaaaagugacaucauau

SEQ ID NO: 148695 - RNA, 25 nt, Artificial Sequence
  Description of Artificial Sequence: Synthetic oligonucleotide
agaugcaauuugaaucuucaucaua

SEQ ID NO: 148696 - RNA, 25 nt, Artificial Sequence
  Description of Artificial Sequence: Synthetic oligonucleotide
guucaaaacgaagacuagcuauuaa

SEQ ID NO: 148697 - RNA, 25 nt, Artificial Sequence
  Description of Artificial Sequence: Synthetic oligonucleotide
gugaaaccucaucucuacuaaaaau

SEQ ID NO: 148698 - RNA, 25 nt, Artificial Sequence
  Description of Artificial Sequence: Synthetic oligonucleotide
acgaaagagaagcucuaucucgccu

SEQ ID NO: 148699 - RNA, 25 nt, Artificial Sequence
  Description of Artificial Sequence: Synthetic oligonucleotide
cuccacaagcgccuucgguccaguu

SEQ ID NO: 148700 - RNA, 25 nt, Artificial Sequence
  Description of Artificial Sequence: Synthetic oligonucleotide
gagaagauuccaaagauguagccgc

SEQ ID NO: 148701 - RNA, 25 nt, Artificial Sequence
  Description of Artificial Sequence: Synthetic oligonucleotide
aaucuggauucaaugaggagacuug

SEQ ID NO: 148702 - RNA, 25 nt, Artificial Sequence
  Description of Artificial Sequence: Synthetic oligonucleotide
agaacagauuugagaguagugagga

SEQ ID NO: 148703 - RNA, 25 nt, Artificial Sequence
  Description of Artificial Sequence: Synthetic oligonucleotide
ccagagcugugcagaugaguacaaa

SEQ ID NO: 148704 - RNA, 25 nt, Artificial Sequence
  Description of Artificial Sequence: Synthetic oligonucleotide
ccucagauuguuguuguuaaugggc

SEQ ID NO: 148705 - RNA, 25 nt, Artificial Sequence
  Description of Artificial Sequence: Synthetic oligonucleotide
cuauuuuaauuauuuuuaauuuauu

SEQ ID NO: 148706 - RNA, 25 nt, Artificial Sequence
  Description of Artificial Sequence: Synthetic oligonucleotide
uuuaauuuauuaauauuuaaauaug

SEQ ID NO: 148707 - RNA, 25 nt, Artificial Sequence
  Description of Artificial Sequence: Synthetic oligonucleotide
augcaguuugaauauccuuuguuuc

SEQ ID NO: 148708 - RNA, 25 nt, Artificial Sequence
  Description of Artificial Sequence: Synthetic oligonucleotide
caugcugcuggcgucuaaguguuug

SEQ ID NO: 148709 - RNA, 25 nt, Artificial Sequence
  Description of Artificial Sequence: Synthetic oligonucleotide
agaugugcauuucaccugugacaaa

SEQ ID NO: 148710 - RNA, 25 nt, Artificial Sequence
  Description of Artificial Sequence: Synthetic oligonucleotide
ucaaaaccugugccaggcugaauua

SEQ ID NO: 148711 - RNA, 25 nt, Artificial Sequence
  Description of Artificial Sequence: Synthetic oligonucleotide
gaauguggguagucauucuuacaau

SEQ ID NO: 148712 - RNA, 25 nt, Artificial Sequence
  Description of Artificial Sequence: Synthetic oligonucleotide
auguggguagucauucuuacaauug

SEQ ID NO: 148713 - RNA, 25 nt, Artificial Sequence
  Description of Artificial Sequence: Synthetic oligonucleotide
ugaaaaugagcaucagagaguguac

SEQ ID NO: 148714 - RNA, 25 nt, Artificial Sequence
  Description of Artificial Sequence: Synthetic oligonucleotide
uugcuuuucauguagaacucagcag

SEQ ID NO: 148715 - RNA, 25 nt, Artificial Sequence
  Description of Artificial Sequence: Synthetic oligonucleotide
uguauuucuauauuuauuuucagua

SEQ ID NO: 148716 - RNA, 25 nt, Artificial Sequence
  Description of Artificial Sequence: Synthetic oligonucleotide
uuugauuaauguuucuuaaauggaa

SEQ ID NO: 148717 - RNA, 25 nt, Artificial Sequence
  Description of Artificial Sequence: Synthetic oligonucleotide
caacguguauagugccuaaaauugu

SEQ ID NO: 148718 - RNA, 25 nt, Artificial Sequence
  Description of Artificial Sequence: Synthetic oligonucleotide
cauauccuuggcuacuaacaucugg

SEQ ID NO: 148719 - RNA, 25 nt, Artificial Sequence
  Description of Artificial Sequence: Synthetic oligonucleotide
uacuaacaucuggagacugugagcu

SEQ ID NO: 148720 - RNA, 25 nt, Artificial Sequence
  Description of Artificial Sequence: Synthetic oligonucleotide
cauaaguugugugcuuuuuauuaau

SEQ ID NO: 148721 - RNA, 25 nt, Artificial Sequence
  Description of Artificial Sequence: Synthetic oligonucleotide
gcaucauuuuggcucuucuuacauu

SEQ ID NO: 148722 - RNA, 25 nt, Artificial Sequence
  Description of Artificial Sequence: Synthetic oligonucleotide
gcucuucuuacauuuguaaaaaugu

SEQ ID NO: 148723 - RNA, 25 nt, Artificial Sequence
  Description of Artificial Sequence: Synthetic oligonucleotide
agauuaggucaucuuaauucauauu

SEQ ID NO: 148724 - RNA, 25 nt, Artificial Sequence
  Description of Artificial Sequence: Synthetic oligonucleotide
auggaauugaaagaacuaaucauga

SEQ ID NO: 148725 - RNA, 25 nt, Artificial Sequence
  Description of Artificial Sequence: Synthetic oligonucleotide
cacacucauuccuucugcucuuggg

SEQ ID NO: 148726 - RNA, 25 nt, Artificial Sequence
  Description of Artificial Sequence: Synthetic oligonucleotide
uguagagguaaccaguagcuuugag

SEQ ID NO: 148727 - RNA, 25 nt, Artificial Sequence
  Description of Artificial Sequence: Synthetic oligonucleotide
caaccacaugccacguaauauuuca

SEQ ID NO: 148728 - RNA, 25 nt, Artificial Sequence
  Description of Artificial Sequence: Synthetic oligonucleotide
ucggaaacaaguuauucucuucacu

SEQ ID NO: 148729 - RNA, 25 nt, Artificial Sequence
  Description of Artificial Sequence: Synthetic oligonucleotide
acucccaauaacuaaugcuaagaaa

SEQ ID NO: 148730 - RNA, 25 nt, Artificial Sequence
  Description of Artificial Sequence: Synthetic oligonucleotide
aaugcuaagaaaugcugaaaaucaa

SEQ ID NO: 148731 - RNA, 25 nt, Artificial Sequence
  Description of Artificial Sequence: Synthetic oligonucleotide
gucuuucucuaaauaugauuacuuu

SEQ ID NO: 148732 - RNA, 25 nt, Artificial Sequence
  Description of Artificial Sequence: Synthetic oligonucleotide
ugaauuucaggcauuuuguucuaca

SEQ ID NO: 148733 - RNA, 25 nt, Artificial Sequence
  Description of Artificial Sequence: Synthetic oligonucleotide
cgauucccucucacccgggacucuc

SEQ ID NO: 148734 - RNA, 25 nt, Artificial Sequence
  Description of Artificial Sequence: Synthetic oligonucleotide
aggaaagugaaccuuuaaaguaaag

SEQ ID NO: 148735 - RNA, 25 nt, Artificial Sequence
  Description of Artificial Sequence: Synthetic oligonucleotide
gaggcugcaugcucuggaagccugg

SEQ ID NO: 148736 - RNA, 25 nt, Artificial Sequence
  Description of Artificial Sequence: Synthetic oligonucleotide
ucucugaacagaaaacaaaagagag

SEQ ID NO: 148737 - RNA, 25 nt, Artificial Sequence
  Description of Artificial Sequence: Synthetic oligonucleotide
aacuuggcuguaaucaguuaugccg

SEQ ID NO: 148738 - RNA, 25 nt, Artificial Sequence
  Description of Artificial Sequence: Synthetic oligonucleotide
agaagccaaaauuaaaagaagucca

SEQ ID NO: 148739 - RNA, 25 nt, Artificial Sequence
  Description of Artificial Sequence: Synthetic oligonucleotide
auuaaaagaaguccaggugagguua

SEQ ID NO: 148740 - RNA, 25 nt, Artificial Sequence
  Description of Artificial Sequence: Synthetic oligonucleotide
gaauccggauuaucgggaagaggac

SEQ ID NO: 148741 - RNA, 25 nt, Artificial Sequence
  Description of Artificial Sequence: Synthetic oligonucleotide
aaugugacaucaaagcaaguauugu

SEQ ID NO: 148742 - RNA, 25 nt, Artificial Sequence
  Description of Artificial Sequence: Synthetic oligonucleotide
caucaaagcaaguauuguagcacuc

SEQ ID NO: 148743 - RNA, 25 nt, Artificial Sequence
  Description of Artificial Sequence: Synthetic oligonucleotide
agagagagaaaacaaaaccacaaau

SEQ ID NO: 148744 - RNA, 25 nt, Artificial Sequence
  Description of Artificial Sequence: Synthetic oligonucleotide
ucgcuguaguauuuaagcccauaca

SEQ ID NO: 148745 - RNA, 25 nt, Artificial Sequence
  Description of Artificial Sequence: Synthetic oligonucleotide
cgcuguaguauuuaagcccauacag

SEQ ID NO: 148746 - RNA, 25 nt, Artificial Sequence
  Description of Artificial Sequence: Synthetic oligonucleotide
auuuaagcccauacagaaaccuucc

SEQ ID NO: 148747 - RNA, 25 nt, Artificial Sequence
  Description of Artificial Sequence: Synthetic oligonucleotide
auuaaaauaaacaugguauaccuac

SEQ ID NO: 148748 - RNA, 25 nt, Artificial Sequence
  Description of Artificial Sequence: Synthetic oligonucleotide
cuguucugaucggccaguuuucgga

SEQ ID NO: 148749 - RNA, 25 nt, Artificial Sequence
  Description of Artificial Sequence: Synthetic oligonucleotide
aaauaauuugaacuuuggaacaggg

SEQ ID NO: 148750 - RNA, 25 nt, Artificial Sequence
  Description of Artificial Sequence: Synthetic oligonucleotide
ugcgaccuuaauuuaacuuuccagu

SEQ ID NO: 148751 - RNA, 25 nt, Artificial Sequence
  Description of Artificial Sequence: Synthetic oligonucleotide
cugagaaagcuaaaguuugguuuug

SEQ ID NO: 148752 - RNA, 25 nt, Artificial Sequence
  Description of Artificial Sequence: Synthetic oligonucleotide
aguaaagaugcuacuucccacugua

SEQ ID NO: 148753 - RNA, 25 nt, Artificial Sequence
  Description of Artificial Sequence: Synthetic oligonucleotide
cugcuuaauugcugauaccauauga

SEQ ID NO: 148754 - RNA, 25 nt, Artificial Sequence
  Description of Artificial Sequence: Synthetic oligonucleotide
uaccauaugaaugaaacaugggcug

SEQ ID NO: 148755 - RNA, 25 nt, Artificial Sequence
  Description of Artificial Sequence: Synthetic oligonucleotide
aacuuucuuauccaacuuuuucaua

SEQ ID NO: 148756 - RNA, 25 nt, Artificial Sequence
  Description of Artificial Sequence: Synthetic oligonucleotide
ccuugcaugacaucaugaggccgga

SEQ ID NO: 148757 - RNA, 25 nt, Artificial Sequence
  Description of Artificial Sequence: Synthetic oligonucleotide
ugaauuuguauaugacugcauuugu

SEQ ID NO: 148758 - RNA, 25 nt, Artificial Sequence
  Description of Artificial Sequence: Synthetic oligonucleotide
gaauccuaguagaauguuuacuacc

SEQ ID NO: 148759 - RNA, 25 nt, Artificial Sequence
  Description of Artificial Sequence: Synthetic oligonucleotide
gaaagggaagaauuuuuugaugaaa

SEQ ID NO: 148760 - RNA, 25 nt, Artificial Sequence
  Description of Artificial Sequence: Synthetic oligonucleotide
uaucggcaugccagugugugaauuu

SEQ ID NO: 148761 - RNA, 25 nt, Artificial Sequence
  Description of Artificial Sequence: Synthetic oligonucleotide
caccucauaguagagcaauguaugu

SEQ ID NO: 148762 - RNA, 25 nt, Artificial Sequence
  Description of Artificial Sequence: Synthetic oligonucleotide
ccagaauugccaaagcacauauaua

SEQ ID NO: 148763 - RNA, 25 nt, Artificial Sequence
  Description of Artificial Sequence: Synthetic oligonucleotide
uggugaucuggguaauaguuucucc

SEQ ID NO: 148764 - RNA, 25 nt, Artificial Sequence
  Description of Artificial Sequence: Synthetic oligonucleotide
gaucuggguaauaguuucuccaaau

SEQ ID NO: 148765 - RNA, 25 nt, Artificial Sequence
  Description of Artificial Sequence: Synthetic oligonucleotide
ggaugugaugaauacuuccuagaaa

SEQ ID NO: 148766 - RNA, 25 nt, Artificial Sequence
  Description of Artificial Sequence: Synthetic oligonucleotide
cauuuccacagcuacaccauauaug

SEQ ID NO: 148767 - RNA, 25 nt, Artificial Sequence
  Description of Artificial Sequence: Synthetic oligonucleotide
acagcuacaccauauaugaauggag

SEQ ID NO: 148768 - RNA, 25 nt, Artificial Sequence
  Description of Artificial Sequence: Synthetic oligonucleotide
ugcaguucuuacacgagaagaagau

SEQ ID NO: 148769 - RNA, 25 nt, Artificial Sequence
  Description of Artificial Sequence: Synthetic oligonucleotide
acgagaagaagaucauuuacaggga

SEQ ID NO: 148770 - RNA, 25 nt, Artificial Sequence
  Description of Artificial Sequence: Synthetic oligonucleotide
cgagaagaagaucauuuacagggac

SEQ ID NO: 148771 - RNA, 25 nt, Artificial Sequence
  Description of Artificial Sequence: Synthetic oligonucleotide
aagaagaucauuuacagggaccuga

SEQ ID NO: 148772 - RNA, 25 nt, Artificial Sequence
  Description of Artificial Sequence: Synthetic oligonucleotide
agaggaagagguguuugacugcauc

SEQ ID NO: 148773 - RNA, 25 nt, Artificial Sequence
  Description of Artificial Sequence: Synthetic oligonucleotide
gaggaagagguguuugacugcaucg

SEQ ID NO: 148774 - RNA, 25 nt, Artificial Sequence
  Description of Artificial Sequence: Synthetic oligonucleotide
cuacuuugagggcgaguucacaggg

SEQ ID NO: 148775 - RNA, 25 nt, Artificial Sequence
  Description of Artificial Sequence: Synthetic oligonucleotide
agggcaucuccuggcaccucugucc

SEQ ID NO: 148776 - RNA, 25 nt, Artificial Sequence
  Description of Artificial Sequence: Synthetic oligonucleotide
ggagugauaugguuugucuuuuuaa

SEQ ID NO: 148777 - RNA, 25 nt, Artificial Sequence
  Description of Artificial Sequence: Synthetic oligonucleotide
gagugauaugguuugucuuuuuaag

SEQ ID NO: 148778 - RNA, 25 nt, Artificial Sequence
  Description of Artificial Sequence: Synthetic oligonucleotide
ugcaguaaagauccuaaagguuguc

SEQ ID NO: 148779 - RNA, 25 nt, Artificial Sequence
  Description of Artificial Sequence: Synthetic oligonucleotide
aguaaagauccuaaagguugucgac

SEQ ID NO: 148780 - RNA, 25 nt, Artificial Sequence
  Description of Artificial Sequence: Synthetic oligonucleotide
ugacaaaggacaaccuggcaauugu

SEQ ID NO: 148781 - RNA, 25 nt, Artificial Sequence
  Description of Artificial Sequence: Synthetic oligonucleotide
gcaauugugacccaguggugcgagg

SEQ ID NO: 148782 - RNA, 25 nt, Artificial Sequence
  Description of Artificial Sequence: Synthetic oligonucleotide
aacaucauccauagagacaugaaau

SEQ ID NO: 148783 - RNA, 25 nt, Artificial Sequence
  Description of Artificial Sequence: Synthetic oligonucleotide
ugaaauccaacaauauauuucucca

SEQ ID NO: 148784 - RNA, 25 nt, Artificial Sequence
  Description of Artificial Sequence: Synthetic oligonucleotide
aacaauauauuucuccaugaaggcu

SEQ ID NO: 148785 - RNA, 25 nt, Artificial Sequence
  Description of Artificial Sequence: Synthetic oligonucleotide
aacaguaaagucacgcuggaguggu

SEQ ID NO: 148786 - RNA, 25 nt, Artificial Sequence
  Description of Artificial Sequence: Synthetic oligonucleotide
ugugaagaaaguaaaggaagagagg

SEQ ID NO: 148787 - RNA, 25 nt, Artificial Sequence
  Description of Artificial Sequence: Synthetic oligonucleotide
cuuccgagccauccuugcaucgggc

SEQ ID NO: 148788 - RNA, 25 nt, Artificial Sequence
  Description of Artificial Sequence: Synthetic oligonucleotide
aauggagguugaauauccuacugug

SEQ ID NO: 148789 - RNA, 25 nt, Artificial Sequence
  Description of Artificial Sequence: Synthetic oligonucleotide
ggagguugaauauccuacuguguaa

SEQ ID NO: 148790 - RNA, 25 nt, Artificial Sequence
  Description of Artificial Sequence: Synthetic oligonucleotide
auuuugaguuuucccuuguagugua

SEQ ID NO: 148791 - RNA, 25 nt, Artificial Sequence
  Description of Artificial Sequence: Synthetic oligonucleotide
uauccuguuuguucuuuguugauug

SEQ ID NO: 148792 - RNA, 25 nt, Artificial Sequence
  Description of Artificial Sequence: Synthetic oligonucleotide
ccuguuuguucuuuguugauugaaa

SEQ ID NO: 148793 - RNA, 25 nt, Artificial Sequence
  Description of Artificial Sequence: Synthetic oligonucleotide
cucuacagccuucuuuuucuuccau

SEQ ID NO: 148794 - RNA, 25 nt, Artificial Sequence
  Description of Artificial Sequence: Synthetic oligonucleotide
ucuuccauagcuaaucuuccuucua

SEQ ID NO: 148795 - RNA, 25 nt, Artificial Sequence
  Description of Artificial Sequence: Synthetic oligonucleotide
auaaucuuccuguugaaugcuucau

SEQ ID NO: 148796 - RNA, 25 nt, Artificial Sequence
  Description of Artificial Sequence: Synthetic oligonucleotide
uaaucuuccuguugaaugcuucaug

SEQ ID NO: 148797 - RNA, 25 nt, Artificial Sequence
  Description of Artificial Sequence: Synthetic oligonucleotide
cuucaugacuugaauucuacuuuga

SEQ ID NO: 148798 - RNA, 25 nt, Artificial Sequence
  Description of Artificial Sequence: Synthetic oligonucleotide
aagagggagagaagcaacuacagac

SEQ ID NO: 148799 - RNA, 25 nt, Artificial Sequence
  Description of Artificial Sequence: Synthetic oligonucleotide
cgucuccuaccagaccaaggucaac

SEQ ID NO: 148800 - RNA, 25 nt, Artificial Sequence
  Description of Artificial Sequence: Synthetic oligonucleotide
gaucaaucggcccgacuaucucgac

SEQ ID NO: 148801 - RNA, 25 nt, Artificial Sequence
  Description of Artificial Sequence: Synthetic oligonucleotide
ggacgaacauccaaccuucccaaac

SEQ ID NO: 148802 - RNA, 25 nt, Artificial Sequence
  Description of Artificial Sequence: Synthetic oligonucleotide
agggucggaacccaagcuuagaacu

SEQ ID NO: 148803 - RNA, 25 nt, Artificial Sequence
  Description of Artificial Sequence: Synthetic oligonucleotide
ucggaacccaagcuuagaacuuuaa

SEQ ID NO: 148804 - RNA, 25 nt, Artificial Sequence
  Description of Artificial Sequence: Synthetic oligonucleotide
acccaagcuuagaacuuuaagcaac

SEQ ID NO: 148805 - RNA, 25 nt, Artificial Sequence
  Description of Artificial Sequence: Synthetic oligonucleotide
gaacuuuaagcaacaagaccaccac

SEQ ID NO: 148806 - RNA, 25 nt, Artificial Sequence
  Description of Artificial Sequence: Synthetic oligonucleotide
acuauucaguggcgagaaauaaagu

SEQ ID NO: 148807 - RNA, 25 nt, Artificial Sequence
  Description of Artificial Sequence: Synthetic oligonucleotide
cuauucaguggcgagaaauaaaguu

SEQ ID NO: 148808 - RNA, 25 nt, Artificial Sequence
  Description of Artificial Sequence: Synthetic oligonucleotide
aaacacagauaacaggaaaugaucc

SEQ ID NO: 148809 - RNA, 25 nt, Artificial Sequence
  Description of Artificial Sequence: Synthetic oligonucleotide
cuuaagaaaagagaagaaaugaaac

SEQ ID NO: 148810 - RNA, 25 nt, Artificial Sequence
  Description of Artificial Sequence: Synthetic oligonucleotide
cugaaggaguguguuuccauccucc

SEQ ID NO: 148811 - RNA, 25 nt, Artificial Sequence
  Description of Artificial Sequence: Synthetic oligonucleotide
ucaccgcgggacugaaaaucuuuga

SEQ ID NO: 148812 - RNA, 25 nt, Artificial Sequence
  Description of Artificial Sequence: Synthetic oligonucleotide
agcagaaauaagcgugccguucagg

SEQ ID NO: 148813 - RNA, 25 nt, Artificial Sequence
  Description of Artificial Sequence: Synthetic oligonucleotide
aagcgugccguucaggguccagaag

SEQ ID NO: 148814 - RNA, 25 nt, Artificial Sequence
  Description of Artificial Sequence: Synthetic oligonucleotide
agaaacagucacucaagacugcuug

SEQ ID NO: 148815 - RNA, 25 nt, Artificial Sequence
  Description of Artificial Sequence: Synthetic oligonucleotide
agaggaagaagguccaugucuuugg

SEQ ID NO: 148816 - RNA, 25 nt, Artificial Sequence
  Description of Artificial Sequence: Synthetic oligonucleotide
uguauucaaaauaugccugaaacac

SEQ ID NO: 148817 - RNA, 25 nt, Artificial Sequence
  Description of Artificial Sequence: Synthetic oligonucleotide
auuuuccucccuuucucuguaccuc

SEQ ID NO: 148818 - RNA, 25 nt, Artificial Sequence
  Description of Artificial Sequence: Synthetic oligonucleotide
caaagaaagauagagcaagacaaga

SEQ ID NO: 148819 - RNA, 25 nt, Artificial Sequence
  Description of Artificial Sequence: Synthetic oligonucleotide
aagaaagauagagcaagacaagaaa

SEQ ID NO: 148820 - RNA, 25 nt, Artificial Sequence
  Description of Artificial Sequence: Synthetic oligonucleotide
gaaagcauuuguuuguacaagaucc

SEQ ID NO: 148821 - RNA, 25 nt, Artificial Sequence
  Description of Artificial Sequence: Synthetic oligonucleotide
ugaguuaaacgaacguacuugcaga

SEQ ID NO: 148822 - RNA, 25 nt, Artificial Sequence
  Description of Artificial Sequence: Synthetic oligonucleotide
acugauacagaacgaucgauacaga

SEQ ID NO: 148823 - RNA, 25 nt, Artificial Sequence
  Description of Artificial Sequence: Synthetic oligonucleotide
auauuauauauauauaaaaauaaau

SEQ ID NO: 148824 - RNA, 25 nt, Artificial Sequence
  Description of Artificial Sequence: Synthetic oligonucleotide
auuauauauauauaaaaauaaauau

SEQ ID NO: 148825 - RNA, 25 nt, Artificial Sequence
  Description of Artificial Sequence: Synthetic oligonucleotide
ucacuggauguauuugacugcugug

SEQ ID NO: 148826 - RNA, 25 nt, Artificial Sequence
  Description of Artificial Sequence: Synthetic oligonucleotide
cagggaagaggaggagaugagagac

SEQ ID NO: 148827 - RNA, 25 nt, Artificial Sequence
  Description of Artificial Sequence: Synthetic oligonucleotide
augaucuuuuuuuugucccacuugg

SEQ ID NO: 148828 - RNA, 27 nt, Artificial Sequence
  Description of Artificial Sequence: Synthetic oligonucleotide
ggccgugaacuccucaucaaaauaccu

SEQ ID NO: 148829 - RNA, 27 nt, Artificial Sequence
  Description of Artificial Sequence: Synthetic oligonucleotide
uggugugauggugaucaucugggccgu

SEQ ID NO: 148830 - RNA, 27 nt, Artificial Sequence
  Description of Artificial Sequence: Synthetic oligonucleotide
aaacccgcaggauaguuuucuucccua

SEQ ID NO: 148831 - RNA, 27 nt, Artificial Sequence
  Description of Artificial Sequence: Synthetic oligonucleotide
caaacuggaugaaauaaauuaaaaccc

SEQ ID NO: 148832 - RNA, 27 nt, Artificial Sequence
  Description of Artificial Sequence: Synthetic oligonucleotide
agaaguccuuaacauuucccuacguga

SEQ ID NO: 148833 - RNA, 27 nt, Artificial Sequence
  Description of Artificial Sequence: Synthetic oligonucleotide
cucugucccacuggguaaacccuggcc

SEQ ID NO: 148834 - RNA, 27 nt, Artificial Sequence
  Description of Artificial Sequence: Synthetic oligonucleotide
cacaauaacaaauuuaaaccuugcucc

SEQ ID NO: 148835 - RNA, 27 nt, Artificial Sequence
  Description of Artificial Sequence: Synthetic oligonucleotide
aaaugcauuugaacaacauaauacaca

SEQ ID NO: 148836 - RNA, 27 nt, Artificial Sequence
  Description of Artificial Sequence: Synthetic oligonucleotide
ggcuuuccugucacaaagauuaaaaac

SEQ ID NO: 148837 - RNA, 27 nt, Artificial Sequence
  Description of Artificial Sequence: Synthetic oligonucleotide
agggcuuuccugucacaaagauuaaaa

SEQ ID NO: 148838 - RNA, 27 nt, Artificial Sequence
  Description of Artificial Sequence: Synthetic oligonucleotide
ggccaugcugggagacauaagcagcag

SEQ ID NO: 148839 - RNA, 27 nt, Artificial Sequence
  Description of Artificial Sequence: Synthetic oligonucleotide
ucagggagaagcuucugaaacacuucu

SEQ ID NO: 148840 - RNA, 27 nt, Artificial Sequence
  Description of Artificial Sequence: Synthetic oligonucleotide
aagggcuucuuccuuauugauggucag

SEQ ID NO: 148841 - RNA, 27 nt, Artificial Sequence
  Description of Artificial Sequence: Synthetic oligonucleotide
ugaagggcuucuuccuuauugaugguc

SEQ ID NO: 148842 - RNA, 27 nt, Artificial Sequence
  Description of Artificial Sequence: Synthetic oligonucleotide
cgcugaagggcuucuuccuuauugaug

SEQ ID NO: 148843 - RNA, 27 nt, Artificial Sequence
  Description of Artificial Sequence: Synthetic oligonucleotide
gccgcugaagggcuucuuccuuauuga

SEQ ID NO: 148844 - RNA, 27 nt, Artificial Sequence
  Description of Artificial Sequence: Synthetic oligonucleotide
acuggccgcugaagggcuucuuccuua

SEQ ID NO: 148845 - RNA, 27 nt, Artificial Sequence
  Description of Artificial Sequence: Synthetic oligonucleotide
cggagcuuuucaccuuuaguuaugcuu

SEQ ID NO: 148846 - RNA, 27 nt, Artificial Sequence
  Description of Artificial Sequence: Synthetic oligonucleotide
ccggagcuuuucaccuuuaguuaugcu

SEQ ID NO: 148847 - RNA, 27 nt, Artificial Sequence
  Description of Artificial Sequence: Synthetic oligonucleotide
cagacuguugacuggcgugauguaguu

SEQ ID NO: 148848 - RNA, 27 nt, Artificial Sequence
  Description of Artificial Sequence: Synthetic oligonucleotide
cuuuugaacucugcuuaaauccagugg

SEQ ID NO: 148849 - RNA, 27 nt, Artificial Sequence
  Description of Artificial Sequence: Synthetic oligonucleotide
gcuuuugaacucugcuuaaauccagug

SEQ ID NO: 148850 - RNA, 27 nt, Artificial Sequence
  Description of Artificial Sequence: Synthetic oligonucleotide
agggcuuuugaacucugcuuaaaucca

SEQ ID NO: 148851 - RNA, 27 nt, Artificial Sequence
  Description of Artificial Sequence: Synthetic oligonucleotide
aagggcuuuugaacucugcuuaaaucc

SEQ ID NO: 148852 - RNA, 27 nt, Artificial Sequence
  Description of Artificial Sequence: Synthetic oligonucleotide
ugaagggcuuuugaacucugcuuaaau

SEQ ID NO: 148853 - RNA, 27 nt, Artificial Sequence
  Description of Artificial Sequence: Synthetic oligonucleotide
cugaagggcuuuugaacucugcuuaaa

SEQ ID NO: 148854 - RNA, 27 nt, Artificial Sequence
  Description of Artificial Sequence: Synthetic oligonucleotide
cgcugaagggcuuuugaacucugcuua

SEQ ID NO: 148855 - RNA, 27 nt, Artificial Sequence
  Description of Artificial Sequence: Synthetic oligonucleotide
cgagcggcuucacucagacccugaggc

SEQ ID NO: 148856 - RNA, 27 nt, Artificial Sequence
  Description of Artificial Sequence: Synthetic oligonucleotide
uugacuggcgugauguaguugcuuggg

SEQ ID NO: 148857 - RNA, 27 nt, Artificial Sequence
  Description of Artificial Sequence: Synthetic oligonucleotide
cacgcaccaagaagcugccauugaucc

SEQ ID NO: 148858 - RNA, 27 nt, Artificial Sequence
  Description of Artificial Sequence: Synthetic oligonucleotide
cugaugaauccaaugugggcuggaauc

SEQ ID NO: 148859 - RNA, 27 nt, Artificial Sequence
  Description of Artificial Sequence: Synthetic oligonucleotide
cuuagguauuccacauucucagcugug

SEQ ID NO: 148860 - RNA, 27 nt, Artificial Sequence
  Description of Artificial Sequence: Synthetic oligonucleotide
ugagccucaaauuaggagauacguuuu

SEQ ID NO: 148861 - RNA, 27 nt, Artificial Sequence
  Description of Artificial Sequence: Synthetic oligonucleotide
ccaauuguagagaaauuauuuuaggaa

SEQ ID NO: 148862 - RNA, 27 nt, Artificial Sequence
  Description of Artificial Sequence: Synthetic oligonucleotide
ggcuccuaacuagcugaaucuuccaau

SEQ ID NO: 148863 - RNA, 27 nt, Artificial Sequence
  Description of Artificial Sequence: Synthetic oligonucleotide
guggauauugacuaggagaguuuaaaa

SEQ ID NO: 148864 - RNA, 27 nt, Artificial Sequence
  Description of Artificial Sequence: Synthetic oligonucleotide
ugugacugaacauaacuguaggcugaa

SEQ ID NO: 148865 - RNA, 27 nt, Artificial Sequence
  Description of Artificial Sequence: Synthetic oligonucleotide
guaugugugugugacugaacauaacug

SEQ ID NO: 148866 - RNA, 27 nt, Artificial Sequence
  Description of Artificial Sequence: Synthetic oligonucleotide
aagcaaaaggaacauuuuguaugugug

SEQ ID NO: 148867 - RNA, 27 nt, Artificial Sequence
  Description of Artificial Sequence: Synthetic oligonucleotide
aaaaauuacuuuaaaagcaaaaggaac

SEQ ID NO: 148868 - RNA, 27 nt, Artificial Sequence
  Description of Artificial Sequence: Synthetic oligonucleotide
ccauugacuguugcuucacaggucaga

SEQ ID NO: 148869 - RNA, 27 nt, Artificial Sequence
  Description of Artificial Sequence: Synthetic oligonucleotide
auugguuugucgaugugugagauaguu

SEQ ID NO: 148870 - RNA, 27 nt, Artificial Sequence
  Description of Artificial Sequence: Synthetic oligonucleotide
agugguagcaguacaauugaggacaag

SEQ ID NO: 148871 - RNA, 27 nt, Artificial Sequence
  Description of Artificial Sequence: Synthetic oligonucleotide
uaagaccgcuugccagcuacgguuuca

SEQ ID NO: 148872 - RNA, 27 nt, Artificial Sequence
  Description of Artificial Sequence: Synthetic oligonucleotide
agccgguaagaccgcuugccagcuacg

SEQ ID NO: 148873 - RNA, 27 nt, Artificial Sequence
  Description of Artificial Sequence: Synthetic oligonucleotide
gguaacccaucuuuuaaccauacaacu

SEQ ID NO: 148874 - RNA, 27 nt, Artificial Sequence
  Description of Artificial Sequence: Synthetic oligonucleotide
ucgcagguaacccaucuuuuaaccaua

SEQ ID NO: 148875 - RNA, 27 nt, Artificial Sequence
  Description of Artificial Sequence: Synthetic oligonucleotide
cucagcaagauuguauaauucccugca

SEQ ID NO: 148876 - RNA, 27 nt, Artificial Sequence
  Description of Artificial Sequence: Synthetic oligonucleotide
acuguuuuaugcucagcaagauuguau

SEQ ID NO: 148877 - RNA, 27 nt, Artificial Sequence
  Description of Artificial Sequence: Synthetic oligonucleotide
aggauaaaggacucuucauuauuggaa

SEQ ID NO: 148878 - RNA, 27 nt, Artificial Sequence
  Description of Artificial Sequence: Synthetic oligonucleotide
caacuugcguuggaacauccaaagugu

SEQ ID NO: 148879 - RNA, 27 nt, Artificial Sequence
  Description of Artificial Sequence: Synthetic oligonucleotide
augguuucaguuuaguggaagcauuua

SEQ ID NO: 148880 - RNA, 27 nt, Artificial Sequence
  Description of Artificial Sequence: Synthetic oligonucleotide
auauuuaacaaagucaaacuuucucac

SEQ ID NO: 148881 - RNA, 27 nt, Artificial Sequence
  Description of Artificial Sequence: Synthetic oligonucleotide
aacuuuuaauauacaguaguucuuuuc

SEQ ID NO: 148882 - RNA, 27 nt, Artificial Sequence
  Description of Artificial Sequence: Synthetic oligonucleotide
guuaagucaaaacccguauuucuaaag

SEQ ID NO: 148883 - RNA, 27 nt, Artificial Sequence
  Description of Artificial Sequence: Synthetic oligonucleotide
gugcugaguuugcuguacccauguuga

SEQ ID NO: 148884 - RNA, 27 nt, Artificial Sequence
  Description of Artificial Sequence: Synthetic oligonucleotide
ugaggucagcaucuucugugucuuuac

SEQ ID NO: 148885 - RNA, 27 nt, Artificial Sequence
  Description of Artificial Sequence: Synthetic oligonucleotide
gcgaucugaauaaaccucccuacuagc

SEQ ID NO: 148886 - RNA, 27 nt, Artificial Sequence
  Description of Artificial Sequence: Synthetic oligonucleotide
aucccagaacccugcugcagaaggcca

SEQ ID NO: 148887 - RNA, 27 nt, Artificial Sequence
  Description of Artificial Sequence: Synthetic oligonucleotide
cauaauuuccaauauguaccagaccuu

SEQ ID NO: 148888 - RNA, 27 nt, Artificial Sequence
  Description of Artificial Sequence: Synthetic oligonucleotide
cuagugcuuccaucggaaggacuaggu

SEQ ID NO: 148889 - RNA, 27 nt, Artificial Sequence
  Description of Artificial Sequence: Synthetic oligonucleotide
uccacauaaaaacaauauucacuggga

SEQ ID NO: 148890 - RNA, 27 nt, Artificial Sequence
  Description of Artificial Sequence: Synthetic oligonucleotide
ucuaccaauuccaacuugaauucauug

SEQ ID NO: 148891 - RNA, 27 nt, Artificial Sequence
  Description of Artificial Sequence: Synthetic oligonucleotide
ucuccaagucuaaaucuguguccugag

SEQ ID NO: 148892 - RNA, 27 nt, Artificial Sequence
  Description of Artificial Sequence: Synthetic oligonucleotide
uggaauacuguaacugugcuuugagga

SEQ ID NO: 148893 - RNA, 27 nt, Artificial Sequence
  Description of Artificial Sequence: Synthetic oligonucleotide
uuaauucaucagugguggcagugguag

SEQ ID NO: 148894 - RNA, 27 nt, Artificial Sequence
  Description of Artificial Sequence: Synthetic oligonucleotide
gugaugauguggcacuaguaguuucuu

SEQ ID NO: 148895 - RNA, 27 nt, Artificial Sequence
  Description of Artificial Sequence: Synthetic oligonucleotide
ucuguuuggugaggcuguccgacuuug

SEQ ID NO: 148896 - RNA, 27 nt, Artificial Sequence
  Description of Artificial Sequence: Synthetic oligonucleotide
ccaucauguuccauuuuucgcuuucuc

SEQ ID NO: 148897 - RNA, 27 nt, Artificial Sequence
  Description of Artificial Sequence: Synthetic oligonucleotide
gcagucuacaugcuaaaucagagggua

SEQ ID NO: 148898 - RNA, 27 nt, Artificial Sequence
  Description of Artificial Sequence: Synthetic oligonucleotide
cauaaauagauccuuaaauagcucaaa

SEQ ID NO: 148899 - RNA, 27 nt, Artificial Sequence
  Description of Artificial Sequence: Synthetic oligonucleotide
ugauaauagugcuuuuucaccuuuuuc

SEQ ID NO: 148900 - RNA, 27 nt, Artificial Sequence
  Description of Artificial Sequence: Synthetic oligonucleotide
gcagaacugauaauagugcuuuuucac

SEQ ID NO: 148901 - RNA, 27 nt, Artificial Sequence
  Description of Artificial Sequence: Synthetic oligonucleotide
guagguuuaaucuuucuuuucagccau

SEQ ID NO: 148902 - RNA, 27 nt, Artificial Sequence
  Description of Artificial Sequence: Synthetic oligonucleotide
agaaggauuuuauuauaaggguuuaau

SEQ ID NO: 148903 - RNA, 27 nt, Artificial Sequence
  Description of Artificial Sequence: Synthetic oligonucleotide
gucuacagcauuggcuaauaguaugaa

SEQ ID NO: 148904 - RNA, 27 nt, Artificial Sequence
  Description of Artificial Sequence: Synthetic oligonucleotide
cuauuccuaucaaaaugcuucugucua

SEQ ID NO: 148905 - RNA, 27 nt, Artificial Sequence
  Description of Artificial Sequence: Synthetic oligonucleotide
ucagggccauuaucuuauuugcucuau

SEQ ID NO: 148906 - RNA, 27 nt, Artificial Sequence
  Description of Artificial Sequence: Synthetic oligonucleotide
ugcuugaggaagagaaaaauguugguc

SEQ ID NO: 148907 - RNA, 27 nt, Artificial Sequence
  Description of Artificial Sequence: Synthetic oligonucleotide
ugggcugaacuuuucucauacuuaaag

SEQ ID NO: 148908 - RNA, 27 nt, Artificial Sequence
  Description of Artificial Sequence: Synthetic oligonucleotide
gguucagcagccaucuuuauuccugcg

SEQ ID NO: 148909 - RNA, 27 nt, Artificial Sequence
  Description of Artificial Sequence: Synthetic oligonucleotide
ugaagagaacuuggucauucaaauuuc

SEQ ID NO: 148910 - RNA, 27 nt, Artificial Sequence
  Description of Artificial Sequence: Synthetic oligonucleotide
cucuaggcuggcuaucuuuauacauac

SEQ ID NO: 148911 - RNA, 27 nt, Artificial Sequence
  Description of Artificial Sequence: Synthetic oligonucleotide
acacuucacagagauaguuacagccau

SEQ ID NO: 148912 - RNA, 27 nt, Artificial Sequence
  Description of Artificial Sequence: Synthetic oligonucleotide
uugaaauuuucucacacuucacagaga

SEQ ID NO: 148913 - RNA, 27 nt, Artificial Sequence
  Description of Artificial Sequence: Synthetic oligonucleotide
ucaggaggauucauuuccuuaaaggaa

SEQ ID NO: 148914 - RNA, 27 nt, Artificial Sequence
  Description of Artificial Sequence: Synthetic oligonucleotide
auaugaugucacuuuuuguauccuuga

SEQ ID NO: 148915 - RNA, 27 nt, Artificial Sequence
  Description of Artificial Sequence: Synthetic oligonucleotide
uaugaugaagauucaaauugcaucuua

SEQ ID NO: 148916 - RNA, 27 nt, Artificial Sequence
  Description of Artificial Sequence: Synthetic oligonucleotide
uuaauagcuagucuucguuuugaacag

SEQ ID NO: 148917 - RNA, 27 nt, Artificial Sequence
  Description of Artificial Sequence: Synthetic oligonucleotide
auuuuuaguagagaugagguuucacca

SEQ ID NO: 148918 - RNA, 27 nt, Artificial Sequence
  Description of Artificial Sequence: Synthetic oligonucleotide
aggcgagauagagcuucucuuucguuc

SEQ ID NO: 148919 - RNA, 27 nt, Artificial Sequence
  Description of Artificial Sequence: Synthetic oligonucleotide
aacuggaccgaaggcgcuuguggagaa

SEQ ID NO: 148920 - RNA, 27 nt, Artificial Sequence
  Description of Artificial Sequence: Synthetic oligonucleotide
gcggcuacaucuuuggaaucuucuccu

SEQ ID NO: 148921 - RNA, 27 nt, Artificial Sequence
  Description of Artificial Sequence: Synthetic oligonucleotide
caagucuccucauugaauccagauugg

SEQ ID NO: 148922 - RNA, 27 nt, Artificial Sequence
  Description of Artificial Sequence: Synthetic oligonucleotide
uccucacuacucucaaaucuguucugg

SEQ ID NO: 148923 - RNA, 27 nt, Artificial Sequence
  Description of Artificial Sequence: Synthetic oligonucleotide
uuuguacucaucugcacagcucuggcu

SEQ ID NO: 148924 - RNA, 27 nt, Artificial Sequence
  Description of Artificial Sequence: Synthetic oligonucleotide
gcccauuaacaacaacaaucugaggug

SEQ ID NO: 148925 - RNA, 27 nt, Artificial Sequence
  Description of Artificial Sequence: Synthetic oligonucleotide
aauaaauuaaaaauaauuaaaauagug

SEQ ID NO: 148926 - RNA, 27 nt, Artificial Sequence
  Description of Artificial Sequence: Synthetic oligonucleotide
cauauuuaaauauuaauaaauuaaaaa

SEQ ID NO: 148927 - RNA, 27 nt, Artificial Sequence
  Description of Artificial Sequence: Synthetic oligonucleotide
gaaacaaaggauauucaaacugcauag

SEQ ID NO: 148928 - RNA, 27 nt, Artificial Sequence
  Description of Artificial Sequence: Synthetic oligonucleotide
caaacacuuagacgccagcagcauggg

SEQ ID NO: 148929 - RNA, 27 nt, Artificial Sequence
  Description of Artificial Sequence: Synthetic oligonucleotide
uuugucacaggugaaaugcacaucuga

SEQ ID NO: 148930 - RNA, 27 nt, Artificial Sequence
  Description of Artificial Sequence: Synthetic oligonucleotide
uaauucagccuggcacagguuuugauc

SEQ ID NO: 148931 - RNA, 27 nt, Artificial Sequence
  Description of Artificial Sequence: Synthetic oligonucleotide
auuguaagaaugacuacccacauucac

SEQ ID NO: 148932 - RNA, 27 nt, Artificial Sequence
  Description of Artificial Sequence: Synthetic oligonucleotide
caauuguaagaaugacuacccacauuc

SEQ ID NO: 148933 - RNA, 27 nt, Artificial Sequence
  Description of Artificial Sequence: Synthetic oligonucleotide
guacacucucugaugcucauuuucaua

SEQ ID NO: 148934 - RNA, 27 nt, Artificial Sequence
  Description of Artificial Sequence: Synthetic oligonucleotide
cugcugaguucuacaugaaaagcaaau

SEQ ID NO: 148935 - RNA, 27 nt, Artificial Sequence
  Description of Artificial Sequence: Synthetic oligonucleotide
uacugaaaauaaauauagaaauacaac

SEQ ID NO: 148936 - RNA, 27 nt, Artificial Sequence
  Description of Artificial Sequence: Synthetic oligonucleotide
uuccauuuaagaaacauuaaucaaaac

SEQ ID NO: 148937 - RNA, 27 nt, Artificial Sequence
  Description of Artificial Sequence: Synthetic oligonucleotide
acaauuuuaggcacuauacacguuguu

SEQ ID NO: 148938 - RNA, 27 nt, Artificial Sequence
  Description of Artificial Sequence: Synthetic oligonucleotide
ccagauguuaguagccaaggauauggu

SEQ ID NO: 148939 - RNA, 27 nt, Artificial Sequence
  Description of Artificial Sequence: Synthetic oligonucleotide
agcucacagucuccagauguuaguagc

SEQ ID NO: 148940 - RNA, 27 nt, Artificial Sequence
  Description of Artificial Sequence: Synthetic oligonucleotide
auuaauaaaaagcacacaacuuauggc

SEQ ID NO: 148941 - RNA, 27 nt, Artificial Sequence
  Description of Artificial Sequence: Synthetic oligonucleotide
aauguaagaagagccaaaaugaugcau

SEQ ID NO: 148942 - RNA, 27 nt, Artificial Sequence
  Description of Artificial Sequence: Synthetic oligonucleotide
acauuuuuacaaauguaagaagagcca

SEQ ID NO: 148943 - RNA, 27 nt, Artificial Sequence
  Description of Artificial Sequence: Synthetic oligonucleotide
aauaugaauuaagaugaccuaaucugu

SEQ ID NO: 148944 - RNA, 27 nt, Artificial Sequence
  Description of Artificial Sequence: Synthetic oligonucleotide
ucaugauuaguucuuucaauuccaucc

SEQ ID NO: 148945 - RNA, 27 nt, Artificial Sequence
  Description of Artificial Sequence: Synthetic oligonucleotide
cccaagagcagaaggaaugagugugca

SEQ ID NO: 148946 - RNA, 27 nt, Artificial Sequence
  Description of Artificial Sequence: Synthetic oligonucleotide
cucaaagcuacugguuaccucuacacc

SEQ ID NO: 148947 - RNA, 27 nt, Artificial Sequence
  Description of Artificial Sequence: Synthetic oligonucleotide
ugaaauauuacguggcaugugguuggg

SEQ ID NO: 148948 - RNA, 27 nt, Artificial Sequence
  Description of Artificial Sequence: Synthetic oligonucleotide
agugaagagaauaacuuguuuccgaag

SEQ ID NO: 148949 - RNA, 27 nt, Artificial Sequence
  Description of Artificial Sequence: Synthetic oligonucleotide
uuucuuagcauuaguuauugggaguga

SEQ ID NO: 148950 - RNA, 27 nt, Artificial Sequence
  Description of Artificial Sequence: Synthetic oligonucleotide
uugauuuucagcauuucuuagcauuag

SEQ ID NO: 148951 - RNA, 27 nt, Artificial Sequence
  Description of Artificial Sequence: Synthetic oligonucleotide
aaaguaaucauauuuagagaaagacag

SEQ ID NO: 148952 - RNA, 27 nt, Artificial Sequence
  Description of Artificial Sequence: Synthetic oligonucleotide
uguagaacaaaaugccugaaauucagc

SEQ ID NO: 148953 - RNA, 27 nt, Artificial Sequence
  Description of Artificial Sequence: Synthetic oligonucleotide
gagagucccgggugagagggaaucgcc

SEQ ID NO: 148954 - RNA, 27 nt, Artificial Sequence
  Description of Artificial Sequence: Synthetic oligonucleotide
cuuuacuuuaaagguucacuuuccuug

SEQ ID NO: 148955 - RNA, 27 nt, Artificial Sequence
  Description of Artificial Sequence: Synthetic oligonucleotide
ccaggcuuccagagcaugcagccuccu

SEQ ID NO: 148956 - RNA, 27 nt, Artificial Sequence
  Description of Artificial Sequence: Synthetic oligonucleotide
cucucuuuuguuuucuguucagagaaa

SEQ ID NO: 148957 - RNA, 27 nt, Artificial Sequence
  Description of Artificial Sequence: Synthetic oligonucleotide
cggcauaacugauuacagccaaguuca

SEQ ID NO: 148958 - RNA, 27 nt, Artificial Sequence
  Description of Artificial Sequence: Synthetic oligonucleotide
uggacuucuuuuaauuuuggcuucuuc

SEQ ID NO: 148959 - RNA, 27 nt, Artificial Sequence
  Description of Artificial Sequence: Synthetic oligonucleotide
uaaccucaccuggacuucuuuuaauuu

SEQ ID NO: 148960 - RNA, 27 nt, Artificial Sequence
  Description of Artificial Sequence: Synthetic oligonucleotide
guccucuucccgauaauccggauucag

SEQ ID NO: 148961 - RNA, 27 nt, Artificial Sequence
  Description of Artificial Sequence: Synthetic oligonucleotide
acaauacuugcuuugaugucacauuaa

SEQ ID NO: 148962 - RNA, 27 nt, Artificial Sequence
  Description of Artificial Sequence: Synthetic oligonucleotide
gagugcuacaauacuugcuuugauguc

SEQ ID NO: 148963 - RNA, 27 nt, Artificial Sequence
  Description of Artificial Sequence: Synthetic oligonucleotide
auuugugguuuuguuuucucucucucu

SEQ ID NO: 148964 - RNA, 27 nt, Artificial Sequence
  Description of Artificial Sequence: Synthetic oligonucleotide
uguaugggcuuaaauacuacagcgagg

SEQ ID NO: 148965 - RNA, 27 nt, Artificial Sequence
  Description of Artificial Sequence: Synthetic oligonucleotide
cuguaugggcuuaaauacuacagcgag

SEQ ID NO: 148966 - RNA, 27 nt, Artificial Sequence
  Description of Artificial Sequence: Synthetic oligonucleotide
ggaagguuucuguaugggcuuaaauac

SEQ ID NO: 148967 - RNA, 27 nt, Artificial Sequence
  Description of Artificial Sequence: Synthetic oligonucleotide
guagguauaccauguuuauuuuaauac

SEQ ID NO: 148968 - RNA, 27 nt, Artificial Sequence
  Description of Artificial Sequence: Synthetic oligonucleotide
uccgaaaacuggccgaucagaacagcc

SEQ ID NO: 148969 - RNA, 27 nt, Artificial Sequence
  Description of Artificial Sequence: Synthetic oligonucleotide
cccuguuccaaaguucaaauuauuugu

SEQ ID NO: 148970 - RNA, 27 nt, Artificial Sequence
  Description of Artificial Sequence: Synthetic oligonucleotide
acuggaaaguuaaauuaaggucgcaau

SEQ ID NO: 148971 - RNA, 27 nt, Artificial Sequence
  Description of Artificial Sequence: Synthetic oligonucleotide
caaaaccaaacuuuagcuuucucagcc

SEQ ID NO: 148972 - RNA, 27 nt, Artificial Sequence
  Description of Artificial Sequence: Synthetic oligonucleotide
uacagugggaaguagcaucuuuacuuu

SEQ ID NO: 148973 - RNA, 27 nt, Artificial Sequence
  Description of Artificial Sequence: Synthetic oligonucleotide
ucauaugguaucagcaauuaagcagua

SEQ ID NO: 148974 - RNA, 27 nt, Artificial Sequence
  Description of Artificial Sequence: Synthetic oligonucleotide
cagcccauguuucauucauaugguauc

SEQ ID NO: 148975 - RNA, 27 nt, Artificial Sequence
  Description of Artificial Sequence: Synthetic oligonucleotide
uaugaaaaaguuggauaagaaaguugg

SEQ ID NO: 148976 - RNA, 27 nt, Artificial Sequence
  Description of Artificial Sequence: Synthetic oligonucleotide
uccggccucaugaugucaugcaaggcu

SEQ ID NO: 148977 - RNA, 27 nt, Artificial Sequence
  Description of Artificial Sequence: Synthetic oligonucleotide
acaaaugcagucauauacaaauucagg

SEQ ID NO: 148978 - RNA, 27 nt, Artificial Sequence
  Description of Artificial Sequence: Synthetic oligonucleotide
gguaguaaacauucuacuaggauucuu

SEQ ID NO: 148979 - RNA, 27 nt, Artificial Sequence
  Description of Artificial Sequence: Synthetic oligonucleotide
uuucaucaaaaaauucuucccuuucug

SEQ ID NO: 148980 - RNA, 27 nt, Artificial Sequence
  Description of Artificial Sequence: Synthetic oligonucleotide
aaauucacacacuggcaugccgauagc

SEQ ID NO: 148981 - RNA, 27 nt, Artificial Sequence
  Description of Artificial Sequence: Synthetic oligonucleotide
acauacauugcucuacuaugaggugaa

SEQ ID NO: 148982 - RNA, 27 nt, Artificial Sequence
  Description of Artificial Sequence: Synthetic oligonucleotide
uauauaugugcuuuggcaauucuggug

SEQ ID NO: 148983 - RNA, 27 nt, Artificial Sequence
  Description of Artificial Sequence: Synthetic oligonucleotide
ggagaaacuauuacccagaucaccacu

SEQ ID NO: 148984 - RNA, 27 nt, Artificial Sequence
  Description of Artificial Sequence: Synthetic oligonucleotide
auuuggagaaacuauuacccagaucac

SEQ ID NO: 148985 - RNA, 27 nt, Artificial Sequence
  Description of Artificial Sequence: Synthetic oligonucleotide
uuucuaggaaguauucaucacauccac

SEQ ID NO: 148986 - RNA, 27 nt, Artificial Sequence
  Description of Artificial Sequence: Synthetic oligonucleotide
cauauaugguguagcuguggaaaugcg

SEQ ID NO: 148987 - RNA, 27 nt, Artificial Sequence
  Description of Artificial Sequence: Synthetic oligonucleotide
cuccauucauauaugguguagcugugg

SEQ ID NO: 148988 - RNA, 27 nt, Artificial Sequence
  Description of Artificial Sequence: Synthetic oligonucleotide
aucuucuucucguguaagaacugcagc

SEQ ID NO: 148989 - RNA, 27 nt, Artificial Sequence
  Description of Artificial Sequence: Synthetic oligonucleotide
ucccuguaaaugaucuucuucucgugu

SEQ ID NO: 148990 - RNA, 27 nt, Artificial Sequence
  Description of Artificial Sequence: Synthetic oligonucleotide
gucccuguaaaugaucuucuucucgug

SEQ ID NO: 148991 - RNA, 27 nt, Artificial Sequence
  Description of Artificial Sequence: Synthetic oligonucleotide
ucaggucccuguaaaugaucuucuucu

SEQ ID NO: 148992 - RNA, 27 nt, Artificial Sequence
  Description of Artificial Sequence: Synthetic oligonucleotide
gaugcagucaaacaccucuuccucugu

SEQ ID NO: 148993 - RNA, 27 nt, Artificial Sequence
  Description of Artificial Sequence: Synthetic oligonucleotide
cgaugcagucaaacaccucuuccucug

SEQ ID NO: 148994 - RNA, 27 nt, Artificial Sequence
  Description of Artificial Sequence: Synthetic oligonucleotide
cccugugaacucgcccucaaaguagcg

SEQ ID NO: 148995 - RNA, 27 nt, Artificial Sequence
  Description of Artificial Sequence: Synthetic oligonucleotide
ggacagaggugccaggagaugcccuca

SEQ ID NO: 148996 - RNA, 27 nt, Artificial Sequence
  Description of Artificial Sequence: Synthetic oligonucleotide
uuaaaaagacaaaccauaucacuccuu

SEQ ID NO: 148997 - RNA, 27 nt, Artificial Sequence
  Description of Artificial Sequence: Synthetic oligonucleotide
cuuaaaaagacaaaccauaucacuccu

SEQ ID NO: 148998 - RNA, 27 nt, Artificial Sequence
  Description of Artificial Sequence: Synthetic oligonucleotide
gacaaccuuuaggaucuuuacugcaac

SEQ ID NO: 148999 - RNA, 27 nt, Artificial Sequence
  Description of Artificial Sequence: Synthetic oligonucleotide
gucgacaaccuuuaggaucuuuacugc

SEQ ID NO: 149000 - RNA, 27 nt, Artificial Sequence
  Description of Artificial Sequence: Synthetic oligonucleotide
acaauugccagguuguccuuugucaug

SEQ ID NO: 149001 - RNA, 27 nt, Artificial Sequence
  Description of Artificial Sequence: Synthetic oligonucleotide
ccucgcaccacugggucacaauugcca

SEQ ID NO: 149002 - RNA, 27 nt, Artificial Sequence
  Description of Artificial Sequence: Synthetic oligonucleotide
auuucaugucucuauggaugauguucu

SEQ ID NO: 149003 - RNA, 27 nt, Artificial Sequence
  Description of Artificial Sequence: Synthetic oligonucleotide
uggagaaauauauuguuggauuucaug

SEQ ID NO: 149004 - RNA, 27 nt, Artificial Sequence
  Description of Artificial Sequence: Synthetic oligonucleotide
agccuucauggagaaauauauuguugg

SEQ ID NO: 149005 - RNA, 27 nt, Artificial Sequence
  Description of Artificial Sequence: Synthetic oligonucleotide
accacuccagcgugacuuuacuguugc

SEQ ID NO: 149006 - RNA, 27 nt, Artificial Sequence
  Description of Artificial Sequence: Synthetic oligonucleotide
ccucucuuccuuuacuuucuucacaca

SEQ ID NO: 149007 - RNA, 27 nt, Artificial Sequence
  Description of Artificial Sequence: Synthetic oligonucleotide
gcccgaugcaaggauggcucggaagcg

SEQ ID NO: 149008 - RNA, 27 nt, Artificial Sequence
  Description of Artificial Sequence: Synthetic oligonucleotide
cacaguaggauauucaaccuccauuuc

SEQ ID NO: 149009 - RNA, 27 nt, Artificial Sequence
  Description of Artificial Sequence: Synthetic oligonucleotide
uuacacaguaggauauucaaccuccau

SEQ ID NO: 149010 - RNA, 27 nt, Artificial Sequence
  Description of Artificial Sequence: Synthetic oligonucleotide
uacacuacaagggaaaacucaaaaucu

SEQ ID NO: 149011 - RNA, 27 nt, Artificial Sequence
  Description of Artificial Sequence: Synthetic oligonucleotide
caaucaacaaagaacaaacaggauaaa

SEQ ID NO: 149012 - RNA, 27 nt, Artificial Sequence
  Description of Artificial Sequence: Synthetic oligonucleotide
uuucaaucaacaaagaacaaacaggau

SEQ ID NO: 149013 - RNA, 27 nt, Artificial Sequence
  Description of Artificial Sequence: Synthetic oligonucleotide
auggaagaaaaagaaggcuguagagaa

SEQ ID NO: 149014 - RNA, 27 nt, Artificial Sequence
  Description of Artificial Sequence: Synthetic oligonucleotide
uagaaggaagauuagcuauggaagaaa

SEQ ID NO: 149015 - RNA, 27 nt, Artificial Sequence
  Description of Artificial Sequence: Synthetic oligonucleotide
augaagcauucaacaggaagauuauuu

SEQ ID NO: 149016 - RNA, 27 nt, Artificial Sequence
  Description of Artificial Sequence: Synthetic oligonucleotide
caugaagcauucaacaggaagauuauu

SEQ ID NO: 149017 - RNA, 27 nt, Artificial Sequence
  Description of Artificial Sequence: Synthetic oligonucleotide
ucaaaguagaauucaagucaugaagca

SEQ ID NO: 149018 - RNA, 27 nt, Artificial Sequence
  Description of Artificial Sequence: Synthetic oligonucleotide
gucuguaguugcuucucucccucuuag

SEQ ID NO: 149019 - RNA, 27 nt, Artificial Sequence
  Description of Artificial Sequence: Synthetic oligonucleotide
guugaccuuggucugguaggagacggc

SEQ ID NO: 149020 - RNA, 27 nt, Artificial Sequence
  Description of Artificial Sequence: Synthetic oligonucleotide
gucgagauagucgggccgauugaucuc

SEQ ID NO: 149021 - RNA, 27 nt, Artificial Sequence
  Description of Artificial Sequence: Synthetic oligonucleotide
guuugggaagguuggauguucguccuc

SEQ ID NO: 149022 - RNA, 27 nt, Artificial Sequence
  Description of Artificial Sequence: Synthetic oligonucleotide
aguucuaagcuuggguuccgacccuaa

SEQ ID NO: 149023 - RNA, 27 nt, Artificial Sequence
  Description of Artificial Sequence: Synthetic oligonucleotide
uuaaaguucuaagcuuggguuccgacc

SEQ ID NO: 149024 - RNA, 27 nt, Artificial Sequence
  Description of Artificial Sequence: Synthetic oligonucleotide
guugcuuaaaguucuaagcuuggguuc

SEQ ID NO: 149025 - RNA, 27 nt, Artificial Sequence
  Description of Artificial Sequence: Synthetic oligonucleotide
gugguggucuuguugcuuaaaguucua

SEQ ID NO: 149026 - RNA, 27 nt, Artificial Sequence
  Description of Artificial Sequence: Synthetic oligonucleotide
acuuuauuucucgccacugaauaguag

SEQ ID NO: 149027 - RNA, 27 nt, Artificial Sequence
  Description of Artificial Sequence: Synthetic oligonucleotide
aacuuuauuucucgccacugaauagua

SEQ ID NO: 149028 - RNA, 27 nt, Artificial Sequence
  Description of Artificial Sequence: Synthetic oligonucleotide
ggaucauuuccuguuaucuguguuugu

SEQ ID NO: 149029 - RNA, 27 nt, Artificial Sequence
  Description of Artificial Sequence: Synthetic oligonucleotide
guuucauuucuucucuuuucuuaaggc

SEQ ID NO: 149030 - RNA, 27 nt, Artificial Sequence
  Description of Artificial Sequence: Synthetic oligonucleotide
ggaggauggaaacacacuccuucaguu

SEQ ID NO: 149031 - RNA, 27 nt, Artificial Sequence
  Description of Artificial Sequence: Synthetic oligonucleotide
ucaaagauuuucagucccgcggugaca

SEQ ID NO: 149032 - RNA, 27 nt, Artificial Sequence
  Description of Artificial Sequence: Synthetic oligonucleotide
ccugaacggcacgcuuauuucugcugu

SEQ ID NO: 149033 - RNA, 27 nt, Artificial Sequence
  Description of Artificial Sequence: Synthetic oligonucleotide
cuucuggacccugaacggcacgcuuau

SEQ ID NO: 149034 - RNA, 27 nt, Artificial Sequence
  Description of Artificial Sequence: Synthetic oligonucleotide
caagcagucuugagugacuguuucuuc

SEQ ID NO: 149035 - RNA, 27 nt, Artificial Sequence
  Description of Artificial Sequence: Synthetic oligonucleotide
ccaaagacauggaccuucuuccucuga

SEQ ID NO: 149036 - RNA, 27 nt, Artificial Sequence
  Description of Artificial Sequence: Synthetic oligonucleotide
guguuucaggcauauuuugaauacauc

SEQ ID NO: 149037 - RNA, 27 nt, Artificial Sequence
  Description of Artificial Sequence: Synthetic oligonucleotide
gagguacagagaaagggaggaaaauag

SEQ ID NO: 149038 - RNA, 27 nt, Artificial Sequence
  Description of Artificial Sequence: Synthetic oligonucleotide
ucuugucuugcucuaucuuucuuuggu

SEQ ID NO: 149039 - RNA, 27 nt, Artificial Sequence
  Description of Artificial Sequence: Synthetic oligonucleotide
uuucuugucuugcucuaucuuucuuug

SEQ ID NO: 149040 - RNA, 27 nt, Artificial Sequence
  Description of Artificial Sequence: Synthetic oligonucleotide
ggaucuuguacaaacaaaugcuuucuc

SEQ ID NO: 149041 - RNA, 27 nt, Artificial Sequence
  Description of Artificial Sequence: Synthetic oligonucleotide
ucugcaaguacguucguuuaacucaag

SEQ ID NO: 149042 - RNA, 27 nt, Artificial Sequence
  Description of Artificial Sequence: Synthetic oligonucleotide
ucuguaucgaucguucuguaucagucu

SEQ ID NO: 149043 - RNA, 27 nt, Artificial Sequence
  Description of Artificial Sequence: Synthetic oligonucleotide
auuuauuuuuauauauauauaauauau

SEQ ID NO: 149044 - RNA, 27 nt, Artificial Sequence
  Description of Artificial Sequence: Synthetic oligonucleotide
auauuuauuuuuauauauauauaauau

SEQ ID NO: 149045 - RNA, 27 nt, Artificial Sequence
  Description of Artificial Sequence: Synthetic oligonucleotide
cacagcagucaaauacauccagugaag

SEQ ID NO: 149046 - RNA, 27 nt, Artificial Sequence
  Description of Artificial Sequence: Synthetic oligonucleotide
gucucucaucuccuccucuucccuguc

SEQ ID NO: 149047 - RNA, 27 nt, Artificial Sequence
  Description of Artificial Sequence: Synthetic oligonucleotide
ccaagugggacaaaaaaaagaucaugc

SEQ ID NO: 149048 - RNA, 14 nt, Artificial Sequence
  Description of Artificial Sequence: Synthetic oligonucleotide
guauuuugaugagg

SEQ ID NO: 149049 - RNA, 12 nt, Artificial Sequence
  Description of Artificial Sequence: Synthetic oligonucleotide
ggcccagaugau

SEQ ID NO: 149050 - RNA, 14 nt, Artificial Sequence
  Description of Artificial Sequence: Synthetic oligonucleotide
gggaagaaaacuau

SEQ ID NO: 149051 - RNA, 15 nt, Artificial Sequence
  Description of Artificial Sequence: Synthetic oligonucleotide
guuuuaauuuauuuc

SEQ ID NO: 149052 - RNA, 12 nt, Artificial Sequence
  Description of Artificial Sequence: Synthetic oligonucleotide
acguagggaaau

SEQ ID NO: 149053 - RNA, 12 nt, Artificial Sequence
  Description of Artificial Sequence: Synthetic oligonucleotide
ccaggguuuacc

SEQ ID NO: 149054 - RNA, 11 nt, Artificial Sequence
  Description of Artificial Sequence: Synthetic oligonucleotide
agcaagguuua

SEQ ID NO: 149055 - RNA, 12 nt, Artificial Sequence
  Description of Artificial Sequence: Synthetic oligonucleotide
uguauuauguug

SEQ ID NO: 149056 - RNA, 15 nt, Artificial Sequence
  Description of Artificial Sequence: Synthetic oligonucleotide
uuuuaaucuuuguga

SEQ ID NO: 149057 - RNA, 14 nt, Artificial Sequence
  Description of Artificial Sequence: Synthetic oligonucleotide
uuaaucuuugugac

SEQ ID NO: 149058 - RNA, 13 nt, Artificial Sequence
  Description of Artificial Sequence: Synthetic oligonucleotide
gcugcuuaugucu

SEQ ID NO: 149059 - RNA, 14 nt, Artificial Sequence
  Description of Artificial Sequence: Synthetic oligonucleotide
aaguguuucagaag

SEQ ID NO: 149060 - RNA, 13 nt, Artificial Sequence
  Description of Artificial Sequence: Synthetic oligonucleotide
gaccaucaauaag

SEQ ID NO: 149061 - RNA, 13 nt, Artificial Sequence
  Description of Artificial Sequence: Synthetic oligonucleotide
ccaucaauaagga

SEQ ID NO: 149062 - RNA, 14 nt, Artificial Sequence
  Description of Artificial Sequence: Synthetic oligonucleotide
ucaauaaggaagaa

SEQ ID NO: 149063 - RNA, 14 nt, Artificial Sequence
  Description of Artificial Sequence: Synthetic oligonucleotide
aauaaggaagaagc

SEQ ID NO: 149064 - RNA, 13 nt, Artificial Sequence
  Description of Artificial Sequence: Synthetic oligonucleotide
aggaagaagcccu

SEQ ID NO: 149065 - RNA, 13 nt, Artificial Sequence
  Description of Artificial Sequence: Synthetic oligonucleotide
gcauaacuaaagg

SEQ ID NO: 149066 - RNA, 14 nt, Artificial Sequence
  Description of Artificial Sequence: Synthetic oligonucleotide
cauaacuaaaggug

SEQ ID NO: 149067 - RNA, 12 nt, Artificial Sequence
  Description of Artificial Sequence: Synthetic oligonucleotide
cuacaucacgcc

SEQ ID NO: 149068 - RNA, 12 nt, Artificial Sequence
  Description of Artificial Sequence: Synthetic oligonucleotide
acuggauuuaag

SEQ ID NO: 149069 - RNA, 12 nt, Artificial Sequence
  Description of Artificial Sequence: Synthetic oligonucleotide
cuggauuuaagc

SEQ ID NO: 149070 - RNA, 13 nt, Artificial Sequence
  Description of Artificial Sequence: Synthetic oligonucleotide
gauuuaagcagag

SEQ ID NO: 149071 - RNA, 13 nt, Artificial Sequence
  Description of Artificial Sequence: Synthetic oligonucleotide
auuuaagcagagu

SEQ ID NO: 149072 - RNA, 13 nt, Artificial Sequence
  Description of Artificial Sequence: Synthetic oligonucleotide
uuaagcagaguuc

SEQ ID NO: 149073 - RNA, 13 nt, Artificial Sequence
  Description of Artificial Sequence: Synthetic oligonucleotide
uaagcagaguuca

SEQ ID NO: 149074 - RNA, 14 nt, Artificial Sequence
  Description of Artificial Sequence: Synthetic oligonucleotide
agcagaguucaaaa

SEQ ID NO: 149075 - RNA, 12 nt, Artificial Sequence
  Description of Artificial Sequence: Synthetic oligonucleotide
cucagggucuga

SEQ ID NO: 149076 - RNA, 13 nt, Artificial Sequence
  Description of Artificial Sequence: Synthetic oligonucleotide
caagcaacuacau

SEQ ID NO: 149077 - RNA, 12 nt, Artificial Sequence
  Description of Artificial Sequence: Synthetic oligonucleotide
aucaauggcagc

SEQ ID NO: 149078 - RNA, 11 nt, Artificial Sequence
  Description of Artificial Sequence: Synthetic oligonucleotide
uuccagcccac

SEQ ID NO: 149079 - RNA, 12 nt, Artificial Sequence
  Description of Artificial Sequence: Synthetic oligonucleotide
cagcugagaaug

SEQ ID NO: 149080 - RNA, 13 nt, Artificial Sequence
  Description of Artificial Sequence: Synthetic oligonucleotide
aacguaucuccua

SEQ ID NO: 149081 - RNA, 14 nt, Artificial Sequence
  Description of Artificial Sequence: Synthetic oligonucleotide
ccuaaaauaauuuc

SEQ ID NO: 149082 - RNA, 13 nt, Artificial Sequence
  Description of Artificial Sequence: Synthetic oligonucleotide
uggaagauucagc

SEQ ID NO: 149083 - RNA, 12 nt, Artificial Sequence
  Description of Artificial Sequence: Synthetic oligonucleotide
uuaaacucuccu

SEQ ID NO: 149084 - RNA, 12 nt, Artificial Sequence
  Description of Artificial Sequence: Synthetic oligonucleotide
cagccuacaguu

SEQ ID NO: 149085 - RNA, 13 nt, Artificial Sequence
  Description of Artificial Sequence: Synthetic oligonucleotide
guuauguucaguc

SEQ ID NO: 149086 - RNA, 13 nt, Artificial Sequence
  Description of Artificial Sequence: Synthetic oligonucleotide
cacauacaaaaug

SEQ ID NO: 149087 - RNA, 9 nt, Artificial Sequence
  Description of Artificial Sequence: Synthetic oligonucleotide
uccuuuugc

SEQ ID NO: 149088 - RNA, 12 nt, Artificial Sequence
  Description of Artificial Sequence: Synthetic oligonucleotide
ugaccugugaag

SEQ ID NO: 149089 - RNA, 12 nt, Artificial Sequence
  Description of Artificial Sequence: Synthetic oligonucleotide
cuaucucacaca

SEQ ID NO: 149090 - RNA, 13 nt, Artificial Sequence
  Description of Artificial Sequence: Synthetic oligonucleotide
uguccucaauugu

SEQ ID NO: 149091 - RNA, 12 nt, Artificial Sequence
  Description of Artificial Sequence: Synthetic oligonucleotide
aaaccguagcug

SEQ ID NO: 149092 - RNA, 12 nt, Artificial Sequence
  Description of Artificial Sequence: Synthetic oligonucleotide
uagcuggcaagc

SEQ ID NO: 149093 - RNA, 14 nt, Artificial Sequence
  Description of Artificial Sequence: Synthetic oligonucleotide
uuguaugguuaaaa

SEQ ID NO: 149094 - RNA, 14 nt, Artificial Sequence
  Description of Artificial Sequence: Synthetic oligonucleotide
ugguuaaaagaugg

SEQ ID NO: 149095 - RNA, 13 nt, Artificial Sequence
  Description of Artificial Sequence: Synthetic oligonucleotide
cagggaauuauac

SEQ ID NO: 149096 - RNA, 12 nt, Artificial Sequence
  Description of Artificial Sequence: Synthetic oligonucleotide
acaaucuugcug

SEQ ID NO: 149097 - RNA, 13 nt, Artificial Sequence
  Description of Artificial Sequence: Synthetic oligonucleotide
ccaauaaugaaga

SEQ ID NO: 149098 - RNA, 13 nt, Artificial Sequence
  Description of Artificial Sequence: Synthetic oligonucleotide
acuuuggauguuc

SEQ ID NO: 149099 - RNA, 12 nt, Artificial Sequence
  Description of Artificial Sequence: Synthetic oligonucleotide
aaugcuuccacu

SEQ ID NO: 149100 - RNA, 11 nt, Artificial Sequence
  Description of Artificial Sequence: Synthetic oligonucleotide
gagaaaguuug

SEQ ID NO: 149101 - RNA, 11 nt, Artificial Sequence
  Description of Artificial Sequence: Synthetic oligonucleotide
aaagaacuacu

SEQ ID NO: 149102 - RNA, 12 nt, Artificial Sequence
  Description of Artificial Sequence: Synthetic oligonucleotide
uuagaaauacgg

SEQ ID NO: 149103 - RNA, 12 nt, Artificial Sequence
  Description of Artificial Sequence: Synthetic oligonucleotide
aacauggguaca

SEQ ID NO: 149104 - RNA, 14 nt, Artificial Sequence
  Description of Artificial Sequence: Synthetic oligonucleotide
aaagacacagaaga

SEQ ID NO: 149105 - RNA, 11 nt, Artificial Sequence
  Description of Artificial Sequence: Synthetic oligonucleotide
uaguagggagg

SEQ ID NO: 149106 - RNA, 12 nt, Artificial Sequence
  Description of Artificial Sequence: Synthetic oligonucleotide
gccuucugcagc

SEQ ID NO: 149107 - RNA, 10 nt, Artificial Sequence
  Description of Artificial Sequence: Synthetic oligonucleotide
ggucugguac

SEQ ID NO: 149108 - RNA, 12 nt, Artificial Sequence
  Description of Artificial Sequence: Synthetic oligonucleotide
cuaguccuuccg

SEQ ID NO: 149109 - RNA, 12 nt, Artificial Sequence
  Description of Artificial Sequence: Synthetic oligonucleotide
ccagugaauauu

SEQ ID NO: 149110 - RNA, 13 nt, Artificial Sequence
  Description of Artificial Sequence: Synthetic oligonucleotide
augaauucaaguu

SEQ ID NO: 149111 - RNA, 12 nt, Artificial Sequence
  Description of Artificial Sequence: Synthetic oligonucleotide
caggacacagau

SEQ ID NO: 149112 - RNA, 12 nt, Artificial Sequence
  Description of Artificial Sequence: Synthetic oligonucleotide
cucaaagcacag

SEQ ID NO: 149113 - RNA, 10 nt, Artificial Sequence
  Description of Artificial Sequence: Synthetic oligonucleotide
accacugcca

SEQ ID NO: 149114 - RNA, 13 nt, Artificial Sequence
  Description of Artificial Sequence: Synthetic oligonucleotide
gaaacuacuagug

SEQ ID NO: 149115 - RNA, 12 nt, Artificial Sequence
  Description of Artificial Sequence: Synthetic oligonucleotide
aagucggacagc

SEQ ID NO: 149116 - RNA, 13 nt, Artificial Sequence
  Description of Artificial Sequence: Synthetic oligonucleotide
gaaagcgaaaaau

SEQ ID NO: 149117 - RNA, 13 nt, Artificial Sequence
  Description of Artificial Sequence: Synthetic oligonucleotide
cccucugauuuag

SEQ ID NO: 149118 - RNA, 12 nt, Artificial Sequence
  Description of Artificial Sequence: Synthetic oligonucleotide
ugagcuauuuaa

SEQ ID NO: 149119 - RNA, 13 nt, Artificial Sequence
  Description of Artificial Sequence: Synthetic oligonucleotide
aaaaggugaaaaa

SEQ ID NO: 149120 - RNA, 14 nt, Artificial Sequence
  Description of Artificial Sequence: Synthetic oligonucleotide
gaaaaagcacuauu

SEQ ID NO: 149121 - RNA, 12 nt, Artificial Sequence
  Description of Artificial Sequence: Synthetic oligonucleotide
ggcugaaaagaa

SEQ ID NO: 149122 - RNA, 12 nt, Artificial Sequence
  Description of Artificial Sequence: Synthetic oligonucleotide
uaaacccuuaua

SEQ ID NO: 149123 - RNA, 13 nt, Artificial Sequence
  Description of Artificial Sequence: Synthetic oligonucleotide
cauacuauuagcc

SEQ ID NO: 149124 - RNA, 12 nt, Artificial Sequence
  Description of Artificial Sequence: Synthetic oligonucleotide
gacagaagcauu

SEQ ID NO: 149125 - RNA, 14 nt, Artificial Sequence
  Description of Artificial Sequence: Synthetic oligonucleotide
agagcaaauaagau

SEQ ID NO: 149126 - RNA, 14 nt, Artificial Sequence
  Description of Artificial Sequence: Synthetic oligonucleotide
ccaacauuuuucuc

SEQ ID NO: 149127 - RNA, 15 nt, Artificial Sequence
  Description of Artificial Sequence: Synthetic oligonucleotide
uuaaguaugagaaaa

SEQ ID NO: 149128 - RNA, 14 nt, Artificial Sequence
  Description of Artificial Sequence: Synthetic oligonucleotide
caggaauaaagaug

SEQ ID NO: 149129 - RNA, 13 nt, Artificial Sequence
  Description of Artificial Sequence: Synthetic oligonucleotide
aauuugaaugacc

SEQ ID NO: 149130 - RNA, 14 nt, Artificial Sequence
  Description of Artificial Sequence: Synthetic oligonucleotide
auguauaaagauag

SEQ ID NO: 149131 - RNA, 12 nt, Artificial Sequence
  Description of Artificial Sequence: Synthetic oligonucleotide
ggcuguaacuau

SEQ ID NO: 149132 - RNA, 11 nt, Artificial Sequence
  Description of Artificial Sequence: Synthetic oligonucleotide
ucugugaagug

SEQ ID NO: 149133 - RNA, 14 nt, Artificial Sequence
  Description of Artificial Sequence: Synthetic oligonucleotide
ccuuuaaggaaaug

SEQ ID NO: 149134 - RNA, 13 nt, Artificial Sequence
  Description of Artificial Sequence: Synthetic oligonucleotide
aaggauacaaaaa

SEQ ID NO: 149135 - RNA, 12 nt, Artificial Sequence
  Description of Artificial Sequence: Synthetic oligonucleotide
agaugcaauuug

SEQ ID NO: 149136 - RNA, 12 nt, Artificial Sequence
  Description of Artificial Sequence: Synthetic oligonucleotide
guucaaaacgaa

SEQ ID NO: 149137 - RNA, 11 nt, Artificial Sequence
  Description of Artificial Sequence: Synthetic oligonucleotide
gugaaaccuca

SEQ ID NO: 149138 - RNA, 13 nt, Artificial Sequence
  Description of Artificial Sequence: Synthetic oligonucleotide
acgaaagagaagc

SEQ ID NO: 149139 - RNA, 12 nt, Artificial Sequence
  Description of Artificial Sequence: Synthetic oligonucleotide
cuccacaagcgc

SEQ ID NO: 149140 - RNA, 14 nt, Artificial Sequence
  Description of Artificial Sequence: Synthetic oligonucleotide
gagaagauuccaaa

SEQ ID NO: 149141 - RNA, 13 nt, Artificial Sequence
  Description of Artificial Sequence: Synthetic oligonucleotide
aaucuggauucaa

SEQ ID NO: 149142 - RNA, 13 nt, Artificial Sequence
  Description of Artificial Sequence: Synthetic oligonucleotide
agaacagauuuga

SEQ ID NO: 149143 - RNA, 11 nt, Artificial Sequence
  Description of Artificial Sequence: Synthetic oligonucleotide
ccagagcugug

SEQ ID NO: 149144 - RNA, 12 nt, Artificial Sequence
  Description of Artificial Sequence: Synthetic oligonucleotide
ccucagauuguu

SEQ ID NO: 149145 - RNA, 12 nt, Artificial Sequence
  Description of Artificial Sequence: Synthetic oligonucleotide
cuauuuuaauua

SEQ ID NO: 149146 - RNA, 13 nt, Artificial Sequence
  Description of Artificial Sequence: Synthetic oligonucleotide
uuuaauuuauuaa

SEQ ID NO: 149147 - RNA, 12 nt, Artificial Sequence
  Description of Artificial Sequence: Synthetic oligonucleotide
augcaguuugaa

SEQ ID NO: 149148 - RNA, 11 nt, Artificial Sequence
  Description of Artificial Sequence: Synthetic oligonucleotide
caugcugcugg

SEQ ID NO: 149149 - RNA, 13 nt, Artificial Sequence
  Description of Artificial Sequence: Synthetic oligonucleotide
agaugugcauuuc

SEQ ID NO: 149150 - RNA, 12 nt, Artificial Sequence
  Description of Artificial Sequence: Synthetic oligonucleotide
ucaaaaccugug

SEQ ID NO: 149151 - RNA, 11 nt, Artificial Sequence
  Description of Artificial Sequence: Synthetic oligonucleotide
gaaugugggua

SEQ ID NO: 149152 - RNA, 10 nt, Artificial Sequence
  Description of Artificial Sequence: Synthetic oligonucleotide
auguggguag

SEQ ID NO: 149153 - RNA, 13 nt, Artificial Sequence
  Description of Artificial Sequence: Synthetic oligonucleotide
ugaaaaugagcau

SEQ ID NO: 149154 - RNA, 13 nt, Artificial Sequence
  Description of Artificial Sequence: Synthetic oligonucleotide
uugcuuuucaugu

SEQ ID NO: 149155 - RNA, 12 nt, Artificial Sequence
  Description of Artificial Sequence: Synthetic oligonucleotide
uguauuucuaua

SEQ ID NO: 149156 - RNA, 13 nt, Artificial Sequence
  Description of Artificial Sequence: Synthetic oligonucleotide
uuugauuaauguu

SEQ ID NO: 149157 - RNA, 12 nt, Artificial Sequence
  Description of Artificial Sequence: Synthetic oligonucleotide
caacguguauag

SEQ ID NO: 149158 - RNA, 12 nt, Artificial Sequence
  Description of Artificial Sequence: Synthetic oligonucleotide
cauauccuuggc

SEQ ID NO: 149159 - RNA, 13 nt, Artificial Sequence
  Description of Artificial Sequence: Synthetic oligonucleotide
uacuaacaucugg

SEQ ID NO: 149160 - RNA, 11 nt, Artificial Sequence
  Description of Artificial Sequence: Synthetic oligonucleotide
cauaaguugug

SEQ ID NO: 149161 - RNA, 12 nt, Artificial Sequence
  Description of Artificial Sequence: Synthetic oligonucleotide
gcaucauuuugg

SEQ ID NO: 149162 - RNA, 10 nt, Artificial Sequence
  Description of Artificial Sequence: Synthetic oligonucleotide
gcucuucuua

SEQ ID NO: 149163 - RNA, 10 nt, Artificial Sequence
  Description of Artificial Sequence: Synthetic oligonucleotide
agauuagguc

SEQ ID NO: 149164 - RNA, 12 nt, Artificial Sequence
  Description of Artificial Sequence: Synthetic oligonucleotide
auggaauugaaa

SEQ ID NO: 149165 - RNA, 13 nt, Artificial Sequence
  Description of Artificial Sequence: Synthetic oligonucleotide
cacacucauuccu

SEQ ID NO: 149166 - RNA, 12 nt, Artificial Sequence
  Description of Artificial Sequence: Synthetic oligonucleotide
uguagagguaac

SEQ ID NO: 149167 - RNA, 11 nt, Artificial Sequence
  Description of Artificial Sequence: Synthetic oligonucleotide
caaccacaugc

SEQ ID NO: 149168 - RNA, 12 nt, Artificial Sequence
  Description of Artificial Sequence: Synthetic oligonucleotide
ucggaaacaagu

SEQ ID NO: 149169 - RNA, 11 nt, Artificial Sequence
  Description of Artificial Sequence: Synthetic oligonucleotide
acucccaauaa

SEQ ID NO: 149170 - RNA, 13 nt, Artificial Sequence
  Description of Artificial Sequence: Synthetic oligonucleotide
aaugcuaagaaau

SEQ ID NO: 149171 - RNA, 11 nt, Artificial Sequence
  Description of Artificial Sequence: Synthetic oligonucleotide
gucuuucucua

SEQ ID NO: 149172 - RNA, 11 nt, Artificial Sequence
  Description of Artificial Sequence: Synthetic oligonucleotide
ugaauuucagg

SEQ ID NO: 149173 - RNA, 13 nt, Artificial Sequence
  Description of Artificial Sequence: Synthetic oligonucleotide
cgauucccucuca

SEQ ID NO: 149174 - RNA, 11 nt, Artificial Sequence
  Description of Artificial Sequence: Synthetic oligonucleotide
aggaaagugaa

SEQ ID NO: 149175 - RNA, 12 nt, Artificial Sequence
  Description of Artificial Sequence: Synthetic oligonucleotide
gaggcugcaugc

SEQ ID NO: 149176 - RNA, 11 nt, Artificial Sequence
  Description of Artificial Sequence: Synthetic oligonucleotide
ucucugaacag

SEQ ID NO: 149177 - RNA, 12 nt, Artificial Sequence
  Description of Artificial Sequence: Synthetic oligonucleotide
aacuuggcugua

SEQ ID NO: 149178 - RNA, 12 nt, Artificial Sequence
  Description of Artificial Sequence: Synthetic oligonucleotide
agaagccaaaau

SEQ ID NO: 149179 - RNA, 14 nt, Artificial Sequence
  Description of Artificial Sequence: Synthetic oligonucleotide
auuaaaagaagucc

SEQ ID NO: 149180 - RNA, 14 nt, Artificial Sequence
  Description of Artificial Sequence: Synthetic oligonucleotide
gaauccggauuauc

SEQ ID NO: 149181 - RNA, 12 nt, Artificial Sequence
  Description of Artificial Sequence: Synthetic oligonucleotide
aaugugacauca

SEQ ID NO: 149182 - RNA, 13 nt, Artificial Sequence
  Description of Artificial Sequence: Synthetic oligonucleotide
caucaaagcaagu

SEQ ID NO: 149183 - RNA, 11 nt, Artificial Sequence
  Description of Artificial Sequence: Synthetic oligonucleotide
agagagagaaa

SEQ ID NO: 149184 - RNA, 13 nt, Artificial Sequence
  Description of Artificial Sequence: Synthetic oligonucleotide
ucgcuguaguauu

SEQ ID NO: 149185 - RNA, 14 nt, Artificial Sequence
  Description of Artificial Sequence: Synthetic oligonucleotide
cgcuguaguauuua

SEQ ID NO: 149186 - RNA, 13 nt, Artificial Sequence
  Description of Artificial Sequence: Synthetic oligonucleotide
auuuaagcccaua

SEQ ID NO: 149187 - RNA, 15 nt, Artificial Sequence
  Description of Artificial Sequence: Synthetic oligonucleotide
auuaaaauaaacaug

SEQ ID NO: 149188 - RNA, 12 nt, Artificial Sequence
  Description of Artificial Sequence: Synthetic oligonucleotide
cuguucugaucg

SEQ ID NO: 149189 - RNA, 16 nt, Artificial Sequence
  Description of Artificial Sequence: Synthetic oligonucleotide
aaauaauuugaacuuu

SEQ ID NO: 149190 - RNA, 12 nt, Artificial Sequence
  Description of Artificial Sequence: Synthetic oligonucleotide
ugcgaccuuaau

SEQ ID NO: 149191 - RNA, 11 nt, Artificial Sequence
  Description of Artificial Sequence: Synthetic oligonucleotide
cugagaaagcu

SEQ ID NO: 149192 - RNA, 13 nt, Artificial Sequence
  Description of Artificial Sequence: Synthetic oligonucleotide
aguaaagaugcua

SEQ ID NO: 149193 - RNA, 12 nt, Artificial Sequence
  Description of Artificial Sequence: Synthetic oligonucleotide
cugcuuaauugc

SEQ ID NO: 149194 - RNA, 14 nt, Artificial Sequence
  Description of Artificial Sequence: Synthetic oligonucleotide
uaccauaugaauga

SEQ ID NO: 149195 - RNA, 12 nt, Artificial Sequence
  Description of Artificial Sequence: Synthetic oligonucleotide
aacuuucuuauc

SEQ ID NO: 149196 - RNA, 13 nt, Artificial Sequence
  Description of Artificial Sequence: Synthetic oligonucleotide
ccuugcaugacau

SEQ ID NO: 149197 - RNA, 14 nt, Artificial Sequence
  Description of Artificial Sequence: Synthetic oligonucleotide
ugaauuuguauaug

SEQ ID NO: 149198 - RNA, 12 nt, Artificial Sequence
  Description of Artificial Sequence: Synthetic oligonucleotide
gaauccuaguag

SEQ ID NO: 149199 - RNA, 10 nt, Artificial Sequence
  Description of Artificial Sequence: Synthetic oligonucleotide
gaaagggaag

SEQ ID NO: 149200 - RNA, 11 nt, Artificial Sequence
  Description of Artificial Sequence: Synthetic oligonucleotide
uaucggcaugc

SEQ ID NO: 149201 - RNA, 12 nt, Artificial Sequence
  Description of Artificial Sequence: Synthetic oligonucleotide
caccucauagua

SEQ ID NO: 149202 - RNA, 11 nt, Artificial Sequence
  Description of Artificial Sequence: Synthetic oligonucleotide
ccagaauugcc

SEQ ID NO: 149203 - RNA, 11 nt, Artificial Sequence
  Description of Artificial Sequence: Synthetic oligonucleotide
uggugaucugg

SEQ ID NO: 149204 - RNA, 12 nt, Artificial Sequence
  Description of Artificial Sequence: Synthetic oligonucleotide
gaucuggguaau

SEQ ID NO: 149205 - RNA, 12 nt, Artificial Sequence
  Description of Artificial Sequence: Synthetic oligonucleotide
ggaugugaugaa

SEQ ID NO: 149206 - RNA, 12 nt, Artificial Sequence
  Description of Artificial Sequence: Synthetic oligonucleotide
cauuuccacagc

SEQ ID NO: 149207 - RNA, 11 nt, Artificial Sequence
  Description of Artificial Sequence: Synthetic oligonucleotide
acagcuacacc

SEQ ID NO: 149208 - RNA, 12 nt, Artificial Sequence
  Description of Artificial Sequence: Synthetic oligonucleotide
ugcaguucuuac

SEQ ID NO: 149209 - RNA, 12 nt, Artificial Sequence
  Description of Artificial Sequence: Synthetic oligonucleotide
acgagaagaaga

SEQ ID NO: 149210 - RNA, 12 nt, Artificial Sequence
  Description of Artificial Sequence: Synthetic oligonucleotide
cgagaagaagau

SEQ ID NO: 149211 - RNA, 15 nt, Artificial Sequence
  Description of Artificial Sequence: Synthetic oligonucleotide
aagaagaucauuuac

SEQ ID NO: 149212 - RNA, 11 nt, Artificial Sequence
  Description of Artificial Sequence: Synthetic oligonucleotide
agaggaagagg

SEQ ID NO: 149213 - RNA, 12 nt, Artificial Sequence
  Description of Artificial Sequence: Synthetic oligonucleotide
gaggaagaggug

SEQ ID NO: 149214 - RNA, 13 nt, Artificial Sequence
  Description of Artificial Sequence: Synthetic oligonucleotide
cuacuuugagggc

SEQ ID NO: 149215 - RNA, 12 nt, Artificial Sequence
  Description of Artificial Sequence: Synthetic oligonucleotide
agggcaucuccu

SEQ ID NO: 149216 - RNA, 10 nt, Artificial Sequence
  Description of Artificial Sequence: Synthetic oligonucleotide
ggagugauau

SEQ ID NO: 149217 - RNA, 11 nt, Artificial Sequence
  Description of Artificial Sequence: Synthetic oligonucleotide
gagugauaugg

SEQ ID NO: 149218 - RNA, 12 nt, Artificial Sequence
  Description of Artificial Sequence: Synthetic oligonucleotide
ugcaguaaagau

SEQ ID NO: 149219 - RNA, 13 nt, Artificial Sequence
  Description of Artificial Sequence: Synthetic oligonucleotide
aguaaagauccua

SEQ ID NO: 149220 - RNA, 12 nt, Artificial Sequence
  Description of Artificial Sequence: Synthetic oligonucleotide
ugacaaaggaca

SEQ ID NO: 149221 - RNA, 13 nt, Artificial Sequence
  Description of Artificial Sequence: Synthetic oligonucleotide
gcaauugugaccc

SEQ ID NO: 149222 - RNA, 12 nt, Artificial Sequence
  Description of Artificial Sequence: Synthetic oligonucleotide
aacaucauccau

SEQ ID NO: 149223 - RNA, 12 nt, Artificial Sequence
  Description of Artificial Sequence: Synthetic oligonucleotide
ugaaauccaaca

SEQ ID NO: 149224 - RNA, 15 nt, Artificial Sequence
  Description of Artificial Sequence: Synthetic oligonucleotide
aacaauauauuucuc

SEQ ID NO: 149225 - RNA, 14 nt, Artificial Sequence
  Description of Artificial Sequence: Synthetic oligonucleotide
aacaguaaagucac

SEQ ID NO: 149226 - RNA, 14 nt, Artificial Sequence
  Description of Artificial Sequence: Synthetic oligonucleotide
ugugaagaaaguaa

SEQ ID NO: 149227 - RNA, 13 nt, Artificial Sequence
  Description of Artificial Sequence: Synthetic oligonucleotide
cuuccgagccauc

SEQ ID NO: 149228 - RNA, 12 nt, Artificial Sequence
  Description of Artificial Sequence: Synthetic oligonucleotide
aauggagguuga

SEQ ID NO: 149229 - RNA, 12 nt, Artificial Sequence
  Description of Artificial Sequence: Synthetic oligonucleotide
ggagguugaaua

SEQ ID NO: 149230 - RNA, 13 nt, Artificial Sequence
  Description of Artificial Sequence: Synthetic oligonucleotide
auuuugaguuuuc

SEQ ID NO: 149231 - RNA, 12 nt, Artificial Sequence
  Description of Artificial Sequence: Synthetic oligonucleotide
uauccuguuugu

SEQ ID NO: 149232 - RNA, 11 nt, Artificial Sequence
  Description of Artificial Sequence: Synthetic oligonucleotide
ccuguuuguuc

SEQ ID NO: 149233 - RNA, 10 nt, Artificial Sequence
  Description of Artificial Sequence: Synthetic oligonucleotide
cucuacagcc

SEQ ID NO: 149234 - RNA, 12 nt, Artificial Sequence
  Description of Artificial Sequence: Synthetic oligonucleotide
ucuuccauagcu

SEQ ID NO: 149235 - RNA, 12 nt, Artificial Sequence
  Description of Artificial Sequence: Synthetic oligonucleotide
auaaucuuccug

SEQ ID NO: 149236 - RNA, 12 nt, Artificial Sequence
  Description of Artificial Sequence: Synthetic oligonucleotide
uaaucuuccugu

SEQ ID NO: 149237 - RNA, 12 nt, Artificial Sequence
  Description of Artificial Sequence: Synthetic oligonucleotide
cuucaugacuug

SEQ ID NO: 149238 - RNA, 12 nt, Artificial Sequence
  Description of Artificial Sequence: Synthetic oligonucleotide
aagagggagaga

SEQ ID NO: 149239 - RNA, 12 nt, Artificial Sequence
  Description of Artificial Sequence: Synthetic oligonucleotide
cgucuccuacca

SEQ ID NO: 149240 - RNA, 12 nt, Artificial Sequence
  Description of Artificial Sequence: Synthetic oligonucleotide
gaucaaucggcc

SEQ ID NO: 149241 - RNA, 12 nt, Artificial Sequence
  Description of Artificial Sequence: Synthetic oligonucleotide
ggacgaacaucc

SEQ ID NO: 149242 - RNA, 11 nt, Artificial Sequence
  Description of Artificial Sequence: Synthetic oligonucleotide
agggucggaac

SEQ ID NO: 149243 - RNA, 10 nt, Artificial Sequence
  Description of Artificial Sequence: Synthetic oligonucleotide
ucggaaccca

SEQ ID NO: 149244 - RNA, 11 nt, Artificial Sequence
  Description of Artificial Sequence: Synthetic oligonucleotide
acccaagcuua

SEQ ID NO: 149245 - RNA, 14 nt, Artificial Sequence
  Description of Artificial Sequence: Synthetic oligonucleotide
gaacuuuaagcaac

SEQ ID NO: 149246 - RNA, 11 nt, Artificial Sequence
  Description of Artificial Sequence: Synthetic oligonucleotide
acuauucagug

SEQ ID NO: 149247 - RNA, 11 nt, Artificial Sequence
  Description of Artificial Sequence: Synthetic oligonucleotide
cuauucagugg

SEQ ID NO: 149248 - RNA, 13 nt, Artificial Sequence
  Description of Artificial Sequence: Synthetic oligonucleotide
aaacacagauaac

SEQ ID NO: 149249 - RNA, 12 nt, Artificial Sequence
  Description of Artificial Sequence: Synthetic oligonucleotide
cuuaagaaaaga

SEQ ID NO: 149250 - RNA, 12 nt, Artificial Sequence
  Description of Artificial Sequence: Synthetic oligonucleotide
cugaaggagugu

SEQ ID NO: 149251 - RNA, 10 nt, Artificial Sequence
  Description of Artificial Sequence: Synthetic oligonucleotide
ucaccgcggg

SEQ ID NO: 149252 - RNA, 14 nt, Artificial Sequence
  Description of Artificial Sequence: Synthetic oligonucleotide
agcagaaauaagcg

SEQ ID NO: 149253 - RNA, 12 nt, Artificial Sequence
  Description of Artificial Sequence: Synthetic oligonucleotide
aagcgugccguu

SEQ ID NO: 149254 - RNA, 12 nt, Artificial Sequence
  Description of Artificial Sequence: Synthetic oligonucleotide
agaaacagucac

SEQ ID NO: 149255 - RNA, 12 nt, Artificial Sequence
  Description of Artificial Sequence: Synthetic oligonucleotide
agaggaagaagg

SEQ ID NO: 149256 - RNA, 14 nt, Artificial Sequence
  Description of Artificial Sequence: Synthetic oligonucleotide
uguauucaaaauau

SEQ ID NO: 149257 - RNA, 13 nt, Artificial Sequence
  Description of Artificial Sequence: Synthetic oligonucleotide
auuuuccucccuu

SEQ ID NO: 149258 - RNA, 13 nt, Artificial Sequence
  Description of Artificial Sequence: Synthetic oligonucleotide
caaagaaagauag

SEQ ID NO: 149259 - RNA, 12 nt, Artificial Sequence
  Description of Artificial Sequence: Synthetic oligonucleotide
aagaaagauaga

SEQ ID NO: 149260 - RNA, 13 nt, Artificial Sequence
  Description of Artificial Sequence: Synthetic oligonucleotide
gaaagcauuuguu

SEQ ID NO: 149261 - RNA, 13 nt, Artificial Sequence
  Description of Artificial Sequence: Synthetic oligonucleotide
ugaguuaaacgaa

SEQ ID NO: 149262 - RNA, 12 nt, Artificial Sequence
  Description of Artificial Sequence: Synthetic oligonucleotide
acugauacagaa

SEQ ID NO: 149263 - RNA, 12 nt, Artificial Sequence
  Description of Artificial Sequence: Synthetic oligonucleotide
auauuauauaua

SEQ ID NO: 149264 - RNA, 12 nt, Artificial Sequence
  Description of Artificial Sequence: Synthetic oligonucleotide
auuauauauaua

SEQ ID NO: 149265 - RNA, 12 nt, Artificial Sequence
  Description of Artificial Sequence: Synthetic oligonucleotide
ucacuggaugua

SEQ ID NO: 149266 - RNA, 12 nt, Artificial Sequence
  Description of Artificial Sequence: Synthetic oligonucleotide
cagggaagagga

SEQ ID NO: 149267 - RNA, 15 nt, Artificial Sequence
  Description of Artificial Sequence: Synthetic oligonucleotide
augaucuuuuuuuug

SEQ ID NO: 149268 - RNA, 11 nt, Artificial Sequence
  Description of Artificial Sequence: Synthetic oligonucleotide
aguucacggcc

SEQ ID NO: 149269 - RNA, 13 nt, Artificial Sequence
  Description of Artificial Sequence: Synthetic oligonucleotide
caccaucacacca

SEQ ID NO: 149270 - RNA, 11 nt, Artificial Sequence
  Description of Artificial Sequence: Synthetic oligonucleotide
ccugcggguuu

SEQ ID NO: 149271 - RNA, 10 nt, Artificial Sequence
  Description of Artificial Sequence: Synthetic oligonucleotide
auccaguuug

SEQ ID NO: 149272 - RNA, 13 nt, Artificial Sequence
  Description of Artificial Sequence: Synthetic oligonucleotide
guuaaggacuucu

SEQ ID NO: 149273 - RNA, 13 nt, Artificial Sequence
  Description of Artificial Sequence: Synthetic oligonucleotide
cagugggacagag

SEQ ID NO: 149274 - RNA, 14 nt, Artificial Sequence
  Description of Artificial Sequence: Synthetic oligonucleotide
aauuuguuauugug

SEQ ID NO: 149275 - RNA, 13 nt, Artificial Sequence
  Description of Artificial Sequence: Synthetic oligonucleotide
uucaaaugcauuu

SEQ ID NO: 149276 - RNA, 10 nt, Artificial Sequence
  Description of Artificial Sequence: Synthetic oligonucleotide
caggaaagcc

SEQ ID NO: 149277 - RNA, 11 nt, Artificial Sequence
  Description of Artificial Sequence: Synthetic oligonucleotide
aggaaagcccu

SEQ ID NO: 149278 - RNA, 12 nt, Artificial Sequence
  Description of Artificial Sequence: Synthetic oligonucleotide
cccagcauggcc

SEQ ID NO: 149279 - RNA, 11 nt, Artificial Sequence
  Description of Artificial Sequence: Synthetic oligonucleotide
cuucucccuga

SEQ ID NO: 149280 - RNA, 12 nt, Artificial Sequence
  Description of Artificial Sequence: Synthetic oligonucleotide
gaagaagcccuu

SEQ ID NO: 149281 - RNA, 12 nt, Artificial Sequence
  Description of Artificial Sequence: Synthetic oligonucleotide
agaagcccuuca

SEQ ID NO: 149282 - RNA, 11 nt, Artificial Sequence
  Description of Artificial Sequence: Synthetic oligonucleotide
gcccuucagcg

SEQ ID NO: 149283 - RNA, 11 nt, Artificial Sequence
  Description of Artificial Sequence: Synthetic oligonucleotide
ccuucagcggc

SEQ ID NO: 149284 - RNA, 12 nt, Artificial Sequence
  Description of Artificial Sequence: Synthetic oligonucleotide
ucagcggccagu

SEQ ID NO: 149285 - RNA, 12 nt, Artificial Sequence
  Description of Artificial Sequence: Synthetic oligonucleotide
ugaaaagcuccg

SEQ ID NO: 149286 - RNA, 11 nt, Artificial Sequence
  Description of Artificial Sequence: Synthetic oligonucleotide
aaaagcuccgg

SEQ ID NO: 149287 - RNA, 13 nt, Artificial Sequence
  Description of Artificial Sequence: Synthetic oligonucleotide
agucaacagucug

SEQ ID NO: 149288 - RNA, 13 nt, Artificial Sequence
  Description of Artificial Sequence: Synthetic oligonucleotide
cagaguucaaaag

SEQ ID NO: 149289 - RNA, 13 nt, Artificial Sequence
  Description of Artificial Sequence: Synthetic oligonucleotide
agaguucaaaagc

SEQ ID NO: 149290 - RNA, 12 nt, Artificial Sequence
  Description of Artificial Sequence: Synthetic oligonucleotide
uucaaaagcccu

SEQ ID NO: 149291 - RNA, 12 nt, Artificial Sequence
  Description of Artificial Sequence: Synthetic oligonucleotide
ucaaaagcccuu

SEQ ID NO: 149292 - RNA, 12 nt, Artificial Sequence
  Description of Artificial Sequence: Synthetic oligonucleotide
aaaagcccuuca

SEQ ID NO: 149293 - RNA, 12 nt, Artificial Sequence
  Description of Artificial Sequence: Synthetic oligonucleotide
aaagcccuucag

SEQ ID NO: 149294 - RNA, 13 nt, Artificial Sequence
  Description of Artificial Sequence: Synthetic oligonucleotide
gugaagccgcucg

SEQ ID NO: 149295 - RNA, 12 nt, Artificial Sequence
  Description of Artificial Sequence: Synthetic oligonucleotide
cacgccagucaa

SEQ ID NO: 149296 - RNA, 13 nt, Artificial Sequence
  Description of Artificial Sequence: Synthetic oligonucleotide
uucuuggugcgug

SEQ ID NO: 149297 - RNA, 14 nt, Artificial Sequence
  Description of Artificial Sequence: Synthetic oligonucleotide
auuggauucaucag

SEQ ID NO: 149298 - RNA, 13 nt, Artificial Sequence
  Description of Artificial Sequence: Synthetic oligonucleotide
uggaauaccuaag

SEQ ID NO: 149299 - RNA, 12 nt, Artificial Sequence
  Description of Artificial Sequence: Synthetic oligonucleotide
auuugaggcuca

SEQ ID NO: 149300 - RNA, 11 nt, Artificial Sequence
  Description of Artificial Sequence: Synthetic oligonucleotide
ucuacaauugg

SEQ ID NO: 149301 - RNA, 12 nt, Artificial Sequence
  Description of Artificial Sequence: Synthetic oligonucleotide
uaguuaggagcc

SEQ ID NO: 149302 - RNA, 13 nt, Artificial Sequence
  Description of Artificial Sequence: Synthetic oligonucleotide
agucaauauccac

SEQ ID NO: 149303 - RNA, 13 nt, Artificial Sequence
  Description of Artificial Sequence: Synthetic oligonucleotide
auguucagucaca

SEQ ID NO: 149304 - RNA, 12 nt, Artificial Sequence
  Description of Artificial Sequence: Synthetic oligonucleotide
acacacacauac

SEQ ID NO: 149305 - RNA, 12 nt, Artificial Sequence
  Description of Artificial Sequence: Synthetic oligonucleotide
uuccuuuugcuu

SEQ ID NO: 149306 - RNA, 16 nt, Artificial Sequence
  Description of Artificial Sequence: Synthetic oligonucleotide
uuuuaaaguaauuuuu

SEQ ID NO: 149307 - RNA, 13 nt, Artificial Sequence
  Description of Artificial Sequence: Synthetic oligonucleotide
caacagucaaugg

SEQ ID NO: 149308 - RNA, 13 nt, Artificial Sequence
  Description of Artificial Sequence: Synthetic oligonucleotide
ucgacaaaccaau

SEQ ID NO: 149309 - RNA, 12 nt, Artificial Sequence
  Description of Artificial Sequence: Synthetic oligonucleotide
acugcuaccacu

SEQ ID NO: 149310 - RNA, 13 nt, Artificial Sequence
  Description of Artificial Sequence: Synthetic oligonucleotide
gcaagcggucuua

SEQ ID NO: 149311 - RNA, 13 nt, Artificial Sequence
  Description of Artificial Sequence: Synthetic oligonucleotide
ggucuuaccggcu

SEQ ID NO: 149312 - RNA, 11 nt, Artificial Sequence
  Description of Artificial Sequence: Synthetic oligonucleotide
gauggguuacc

SEQ ID NO: 149313 - RNA, 11 nt, Artificial Sequence
  Description of Artificial Sequence: Synthetic oligonucleotide
guuaccugcga

SEQ ID NO: 149314 - RNA, 12 nt, Artificial Sequence
  Description of Artificial Sequence: Synthetic oligonucleotide
aaucuugcugag

SEQ ID NO: 149315 - RNA, 13 nt, Artificial Sequence
  Description of Artificial Sequence: Synthetic oligonucleotide
agcauaaaacagu

SEQ ID NO: 149316 - RNA, 12 nt, Artificial Sequence
  Description of Artificial Sequence: Synthetic oligonucleotide
guccuuuauccu

SEQ ID NO: 149317 - RNA, 12 nt, Artificial Sequence
  Description of Artificial Sequence: Synthetic oligonucleotide
caacgcaaguug

SEQ ID NO: 149318 - RNA, 13 nt, Artificial Sequence
  Description of Artificial Sequence: Synthetic oligonucleotide
aaacugaaaccau

SEQ ID NO: 149319 - RNA, 14 nt, Artificial Sequence
  Description of Artificial Sequence: Synthetic oligonucleotide
acuuuguuaaauau

SEQ ID NO: 149320 - RNA, 14 nt, Artificial Sequence
  Description of Artificial Sequence: Synthetic oligonucleotide
guauauuaaaaguu

SEQ ID NO: 149321 - RNA, 13 nt, Artificial Sequence
  Description of Artificial Sequence: Synthetic oligonucleotide
guuuugacuuaac

SEQ ID NO: 149322 - RNA, 13 nt, Artificial Sequence
  Description of Artificial Sequence: Synthetic oligonucleotide
gcaaacucagcac

SEQ ID NO: 149323 - RNA, 11 nt, Artificial Sequence
  Description of Artificial Sequence: Synthetic oligonucleotide
ugcugaccuca

SEQ ID NO: 149324 - RNA, 14 nt, Artificial Sequence
  Description of Artificial Sequence: Synthetic oligonucleotide
uuuauucagaucgc

SEQ ID NO: 149325 - RNA, 13 nt, Artificial Sequence
  Description of Artificial Sequence: Synthetic oligonucleotide
aggguucugggau

SEQ ID NO: 149326 - RNA, 15 nt, Artificial Sequence
  Description of Artificial Sequence: Synthetic oligonucleotide
auauuggaaauuaug

SEQ ID NO: 149327 - RNA, 13 nt, Artificial Sequence
  Description of Artificial Sequence: Synthetic oligonucleotide
auggaagcacuag

SEQ ID NO: 149328 - RNA, 13 nt, Artificial Sequence
  Description of Artificial Sequence: Synthetic oligonucleotide
guuuuuaugugga

SEQ ID NO: 149329 - RNA, 12 nt, Artificial Sequence
  Description of Artificial Sequence: Synthetic oligonucleotide
ggaauugguaga

SEQ ID NO: 149330 - RNA, 13 nt, Artificial Sequence
  Description of Artificial Sequence: Synthetic oligonucleotide
uuagacuuggaga

SEQ ID NO: 149331 - RNA, 13 nt, Artificial Sequence
  Description of Artificial Sequence: Synthetic oligonucleotide
uuacaguauucca

SEQ ID NO: 149332 - RNA, 15 nt, Artificial Sequence
  Description of Artificial Sequence: Synthetic oligonucleotide
ccacugaugaauuaa

SEQ ID NO: 149333 - RNA, 12 nt, Artificial Sequence
  Description of Artificial Sequence: Synthetic oligonucleotide
ccacaucaucac

SEQ ID NO: 149334 - RNA, 13 nt, Artificial Sequence
  Description of Artificial Sequence: Synthetic oligonucleotide
cucaccaaacaga

SEQ ID NO: 149335 - RNA, 12 nt, Artificial Sequence
  Description of Artificial Sequence: Synthetic oligonucleotide
ggaacaugaugg

SEQ ID NO: 149336 - RNA, 12 nt, Artificial Sequence
  Description of Artificial Sequence: Synthetic oligonucleotide
cauguagacugc

SEQ ID NO: 149337 - RNA, 13 nt, Artificial Sequence
  Description of Artificial Sequence: Synthetic oligonucleotide
ggaucuauuuaug

SEQ ID NO: 149338 - RNA, 12 nt, Artificial Sequence
  Description of Artificial Sequence: Synthetic oligonucleotide
gcacuauuauca

SEQ ID NO: 149339 - RNA, 11 nt, Artificial Sequence
  Description of Artificial Sequence: Synthetic oligonucleotide
aucaguucugc

SEQ ID NO: 149340 - RNA, 13 nt, Artificial Sequence
  Description of Artificial Sequence: Synthetic oligonucleotide
agauuaaaccuac

SEQ ID NO: 149341 - RNA, 13 nt, Artificial Sequence
  Description of Artificial Sequence: Synthetic oligonucleotide
auaaaauccuucu

SEQ ID NO: 149342 - RNA, 12 nt, Artificial Sequence
  Description of Artificial Sequence: Synthetic oligonucleotide
aaugcuguagac

SEQ ID NO: 149343 - RNA, 13 nt, Artificial Sequence
  Description of Artificial Sequence: Synthetic oligonucleotide
uugauaggaauag

SEQ ID NO: 149344 - RNA, 11 nt, Artificial Sequence
  Description of Artificial Sequence: Synthetic oligonucleotide
aauggcccuga

SEQ ID NO: 149345 - RNA, 11 nt, Artificial Sequence
  Description of Artificial Sequence: Synthetic oligonucleotide
uuccucaagca

SEQ ID NO: 149346 - RNA, 10 nt, Artificial Sequence
  Description of Artificial Sequence: Synthetic oligonucleotide
guucagccca

SEQ ID NO: 149347 - RNA, 11 nt, Artificial Sequence
  Description of Artificial Sequence: Synthetic oligonucleotide
gcugcugaacc

SEQ ID NO: 149348 - RNA, 12 nt, Artificial Sequence
  Description of Artificial Sequence: Synthetic oligonucleotide
aaguucucuuca

SEQ ID NO: 149349 - RNA, 11 nt, Artificial Sequence
  Description of Artificial Sequence: Synthetic oligonucleotide
ccagccuagag

SEQ ID NO: 149350 - RNA, 13 nt, Artificial Sequence
  Description of Artificial Sequence: Synthetic oligonucleotide
cucugugaagugu

SEQ ID NO: 149351 - RNA, 14 nt, Artificial Sequence
  Description of Artificial Sequence: Synthetic oligonucleotide
ugagaaaauuucaa

SEQ ID NO: 149352 - RNA, 11 nt, Artificial Sequence
  Description of Artificial Sequence: Synthetic oligonucleotide
aauccuccuga

SEQ ID NO: 149353 - RNA, 12 nt, Artificial Sequence
  Description of Artificial Sequence: Synthetic oligonucleotide
gugacaucauau

SEQ ID NO: 149354 - RNA, 13 nt, Artificial Sequence
  Description of Artificial Sequence: Synthetic oligonucleotide
aaucuucaucaua

SEQ ID NO: 149355 - RNA, 13 nt, Artificial Sequence
  Description of Artificial Sequence: Synthetic oligonucleotide
gacuagcuauuaa

SEQ ID NO: 149356 - RNA, 14 nt, Artificial Sequence
  Description of Artificial Sequence: Synthetic oligonucleotide
ucucuacuaaaaau

SEQ ID NO: 149357 - RNA, 12 nt, Artificial Sequence
  Description of Artificial Sequence: Synthetic oligonucleotide
ucuaucucgccu

SEQ ID NO: 149358 - RNA, 13 nt, Artificial Sequence
  Description of Artificial Sequence: Synthetic oligonucleotide
cuucgguccaguu

SEQ ID NO: 149359 - RNA, 11 nt, Artificial Sequence
  Description of Artificial Sequence: Synthetic oligonucleotide
gauguagccgc

SEQ ID NO: 149360 - RNA, 12 nt, Artificial Sequence
  Description of Artificial Sequence: Synthetic oligonucleotide
ugaggagacuug

SEQ ID NO: 149361 - RNA, 12 nt, Artificial Sequence
  Description of Artificial Sequence: Synthetic oligonucleotide
gaguagugagga

SEQ ID NO: 149362 - RNA, 14 nt, Artificial Sequence
  Description of Artificial Sequence: Synthetic oligonucleotide
cagaugaguacaaa

SEQ ID NO: 149363 - RNA, 13 nt, Artificial Sequence
  Description of Artificial Sequence: Synthetic oligonucleotide
guuguuaaugggc

SEQ ID NO: 149364 - RNA, 13 nt, Artificial Sequence
  Description of Artificial Sequence: Synthetic oligonucleotide
uuuuuaauuuauu

SEQ ID NO: 149365 - RNA, 12 nt, Artificial Sequence
  Description of Artificial Sequence: Synthetic oligonucleotide
uauuuaaauaug

SEQ ID NO: 149366 - RNA, 13 nt, Artificial Sequence
  Description of Artificial Sequence: Synthetic oligonucleotide
uauccuuuguuuc

SEQ ID NO: 149367 - RNA, 14 nt, Artificial Sequence
  Description of Artificial Sequence: Synthetic oligonucleotide
cgucuaaguguuug

SEQ ID NO: 149368 - RNA, 12 nt, Artificial Sequence
  Description of Artificial Sequence: Synthetic oligonucleotide
accugugacaaa

SEQ ID NO: 149369 - RNA, 13 nt, Artificial Sequence
  Description of Artificial Sequence: Synthetic oligonucleotide
ccaggcugaauua

SEQ ID NO: 149370 - RNA, 14 nt, Artificial Sequence
  Description of Artificial Sequence: Synthetic oligonucleotide
gucauucuuacaau

SEQ ID NO: 149371 - RNA, 15 nt, Artificial Sequence
  Description of Artificial Sequence: Synthetic oligonucleotide
ucauucuuacaauug

SEQ ID NO: 149372 - RNA, 12 nt, Artificial Sequence
  Description of Artificial Sequence: Synthetic oligonucleotide
cagagaguguac

SEQ ID NO: 149373 - RNA, 12 nt, Artificial Sequence
  Description of Artificial Sequence: Synthetic oligonucleotide
agaacucagcag

SEQ ID NO: 149374 - RNA, 13 nt, Artificial Sequence
  Description of Artificial Sequence: Synthetic oligonucleotide
uuuauuuucagua

SEQ ID NO: 149375 - RNA, 12 nt, Artificial Sequence
  Description of Artificial Sequence: Synthetic oligonucleotide
ucuuaaauggaa

SEQ ID NO: 149376 - RNA, 13 nt, Artificial Sequence
  Description of Artificial Sequence: Synthetic oligonucleotide
ugccuaaaauugu

SEQ ID NO: 149377 - RNA, 12 nt, Artificial Sequence
  Description of Artificial Sequence: Synthetic oligonucleotide
agacugugagcu

SEQ ID NO: 149378 - RNA, 14 nt, Artificial Sequence
  Description of Artificial Sequence: Synthetic oligonucleotide
ugcuuuuuauuaau

SEQ ID NO: 149379 - RNA, 13 nt, Artificial Sequence
  Description of Artificial Sequence: Synthetic oligonucleotide
cucuucuuacauu

SEQ ID NO: 149380 - RNA, 15 nt, Artificial Sequence
  Description of Artificial Sequence: Synthetic oligonucleotide
cauuuguaaaaaugu

SEQ ID NO: 149381 - RNA, 15 nt, Artificial Sequence
  Description of Artificial Sequence: Synthetic oligonucleotide
aucuuaauucauauu

SEQ ID NO: 149382 - RNA, 13 nt, Artificial Sequence
  Description of Artificial Sequence: Synthetic oligonucleotide
gaacuaaucauga

SEQ ID NO: 149383 - RNA, 12 nt, Artificial Sequence
  Description of Artificial Sequence: Synthetic oligonucleotide
ucugcucuuggg

SEQ ID NO: 149384 - RNA, 13 nt, Artificial Sequence
  Description of Artificial Sequence: Synthetic oligonucleotide
caguagcuuugag

SEQ ID NO: 149385 - RNA, 14 nt, Artificial Sequence
  Description of Artificial Sequence: Synthetic oligonucleotide
cacguaauauuuca

SEQ ID NO: 149386 - RNA, 13 nt, Artificial Sequence
  Description of Artificial Sequence: Synthetic oligonucleotide
uauucucuucacu

SEQ ID NO: 149387 - RNA, 14 nt, Artificial Sequence
  Description of Artificial Sequence: Synthetic oligonucleotide
cuaaugcuaagaaa

SEQ ID NO: 149388 - RNA, 12 nt, Artificial Sequence
  Description of Artificial Sequence: Synthetic oligonucleotide
gcugaaaaucaa

SEQ ID NO: 149389 - RNA, 14 nt, Artificial Sequence
  Description of Artificial Sequence: Synthetic oligonucleotide
aauaugauuacuuu

SEQ ID NO: 149390 - RNA, 14 nt, Artificial Sequence
  Description of Artificial Sequence: Synthetic oligonucleotide
cauuuuguucuaca

SEQ ID NO: 149391 - RNA, 12 nt, Artificial Sequence
  Description of Artificial Sequence: Synthetic oligonucleotide
cccgggacucuc

SEQ ID NO: 149392 - RNA, 14 nt, Artificial Sequence
  Description of Artificial Sequence: Synthetic oligonucleotide
ccuuuaaaguaaag

SEQ ID NO: 149393 - RNA, 13 nt, Artificial Sequence
  Description of Artificial Sequence: Synthetic oligonucleotide
ucuggaagccugg

SEQ ID NO: 149394 - RNA, 14 nt, Artificial Sequence
  Description of Artificial Sequence: Synthetic oligonucleotide
aaaacaaaagagag

SEQ ID NO: 149395 - RNA, 13 nt, Artificial Sequence
  Description of Artificial Sequence: Synthetic oligonucleotide
aucaguuaugccg

SEQ ID NO: 149396 - RNA, 13 nt, Artificial Sequence
  Description of Artificial Sequence: Synthetic oligonucleotide
uaaaagaagucca

SEQ ID NO: 149397 - RNA, 11 nt, Artificial Sequence
  Description of Artificial Sequence: Synthetic oligonucleotide
aggugagguua

SEQ ID NO: 149398 - RNA, 11 nt, Artificial Sequence
  Description of Artificial Sequence: Synthetic oligonucleotide
gggaagaggac

SEQ ID NO: 149399 - RNA, 13 nt, Artificial Sequence
  Description of Artificial Sequence: Synthetic oligonucleotide
aagcaaguauugu

SEQ ID NO: 149400 - RNA, 12 nt, Artificial Sequence
  Description of Artificial Sequence: Synthetic oligonucleotide
auuguagcacuc

SEQ ID NO: 149401 - RNA, 14 nt, Artificial Sequence
  Description of Artificial Sequence: Synthetic oligonucleotide
acaaaaccacaaau

SEQ ID NO: 149402 - RNA, 12 nt, Artificial Sequence
  Description of Artificial Sequence: Synthetic oligonucleotide
uaagcccauaca

SEQ ID NO: 149403 - RNA, 11 nt, Artificial Sequence
  Description of Artificial Sequence: Synthetic oligonucleotide
agcccauacag

SEQ ID NO: 149404 - RNA, 12 nt, Artificial Sequence
  Description of Artificial Sequence: Synthetic oligonucleotide
cagaaaccuucc

SEQ ID NO: 149405 - RNA, 10 nt, Artificial Sequence
  Description of Artificial Sequence: Synthetic oligonucleotide
guauaccuac

SEQ ID NO: 149406 - RNA, 13 nt, Artificial Sequence
  Description of Artificial Sequence: Synthetic oligonucleotide
gccaguuuucgga

SEQ ID NO: 149407 - RNA, 9 nt, Artificial Sequence
  Description of Artificial Sequence: Synthetic oligonucleotide
ggaacaggg

SEQ ID NO: 149408 - RNA, 13 nt, Artificial Sequence
  Description of Artificial Sequence: Synthetic oligonucleotide
uuaacuuuccagu

SEQ ID NO: 149409 - RNA, 14 nt, Artificial Sequence
  Description of Artificial Sequence: Synthetic oligonucleotide
aaaguuugguuuug

SEQ ID NO: 149410 - RNA, 12 nt, Artificial Sequence
  Description of Artificial Sequence: Synthetic oligonucleotide
cuucccacugua

SEQ ID NO: 149411 - RNA, 13 nt, Artificial Sequence
  Description of Artificial Sequence: Synthetic oligonucleotide
ugauaccauauga

SEQ ID NO: 149412 - RNA, 11 nt, Artificial Sequence
  Description of Artificial Sequence: Synthetic oligonucleotide
aacaugggcug

SEQ ID NO: 149413 - RNA, 13 nt, Artificial Sequence
  Description of Artificial Sequence: Synthetic oligonucleotide
caacuuuuucaua

SEQ ID NO: 149414 - RNA, 12 nt, Artificial Sequence
  Description of Artificial Sequence: Synthetic oligonucleotide
caugaggccgga

SEQ ID NO: 149415 - RNA, 11 nt, Artificial Sequence
  Description of Artificial Sequence: Synthetic oligonucleotide
acugcauuugu

SEQ ID NO: 149416 - RNA, 13 nt, Artificial Sequence
  Description of Artificial Sequence: Synthetic oligonucleotide
aauguuuacuacc

SEQ ID NO: 149417 - RNA, 15 nt, Artificial Sequence
  Description of Artificial Sequence: Synthetic oligonucleotide
aauuuuuugaugaaa

SEQ ID NO: 149418 - RNA, 14 nt, Artificial Sequence
  Description of Artificial Sequence: Synthetic oligonucleotide
cagugugugaauuu

SEQ ID NO: 149419 - RNA, 13 nt, Artificial Sequence
  Description of Artificial Sequence: Synthetic oligonucleotide
gagcaauguaugu

SEQ ID NO: 149420 - RNA, 14 nt, Artificial Sequence
  Description of Artificial Sequence: Synthetic oligonucleotide
aaagcacauauaua

SEQ ID NO: 149421 - RNA, 14 nt, Artificial Sequence
  Description of Artificial Sequence: Synthetic oligonucleotide
guaauaguuucucc

SEQ ID NO: 149422 - RNA, 13 nt, Artificial Sequence
  Description of Artificial Sequence: Synthetic oligonucleotide
aguuucuccaaau

SEQ ID NO: 149423 - RNA, 13 nt, Artificial Sequence
  Description of Artificial Sequence: Synthetic oligonucleotide
uacuuccuagaaa

SEQ ID NO: 149424 - RNA, 13 nt, Artificial Sequence
  Description of Artificial Sequence: Synthetic oligonucleotide
uacaccauauaug

SEQ ID NO: 149425 - RNA, 14 nt, Artificial Sequence
  Description of Artificial Sequence: Synthetic oligonucleotide
auauaugaauggag

SEQ ID NO: 149426 - RNA, 13 nt, Artificial Sequence
  Description of Artificial Sequence: Synthetic oligonucleotide
acgagaagaagau

SEQ ID NO: 149427 - RNA, 13 nt, Artificial Sequence
  Description of Artificial Sequence: Synthetic oligonucleotide
ucauuuacaggga

SEQ ID NO: 149428 - RNA, 13 nt, Artificial Sequence
  Description of Artificial Sequence: Synthetic oligonucleotide
cauuuacagggac

SEQ ID NO: 149429 - RNA, 10 nt, Artificial Sequence
  Description of Artificial Sequence: Synthetic oligonucleotide
agggaccuga

SEQ ID NO: 149430 - RNA, 14 nt, Artificial Sequence
  Description of Artificial Sequence: Synthetic oligonucleotide
uguuugacugcauc

SEQ ID NO: 149431 - RNA, 13 nt, Artificial Sequence
  Description of Artificial Sequence: Synthetic oligonucleotide
uuugacugcaucg

SEQ ID NO: 149432 - RNA, 12 nt, Artificial Sequence
  Description of Artificial Sequence: Synthetic oligonucleotide
gaguucacaggg

SEQ ID NO: 149433 - RNA, 13 nt, Artificial Sequence
  Description of Artificial Sequence: Synthetic oligonucleotide
ggcaccucugucc

SEQ ID NO: 149434 - RNA, 15 nt, Artificial Sequence
  Description of Artificial Sequence: Synthetic oligonucleotide
gguuugucuuuuuaa

SEQ ID NO: 149435 - RNA, 14 nt, Artificial Sequence
  Description of Artificial Sequence: Synthetic oligonucleotide
uuugucuuuuuaag

SEQ ID NO: 149436 - RNA, 13 nt, Artificial Sequence
  Description of Artificial Sequence: Synthetic oligonucleotide
ccuaaagguuguc

SEQ ID NO: 149437 - RNA, 12 nt, Artificial Sequence
  Description of Artificial Sequence: Synthetic oligonucleotide
aagguugucgac

SEQ ID NO: 149438 - RNA, 13 nt, Artificial Sequence
  Description of Artificial Sequence: Synthetic oligonucleotide
accuggcaauugu

SEQ ID NO: 149439 - RNA, 12 nt, Artificial Sequence
  Description of Artificial Sequence: Synthetic oligonucleotide
aguggugcgagg

SEQ ID NO: 149440 - RNA, 13 nt, Artificial Sequence
  Description of Artificial Sequence: Synthetic oligonucleotide
agagacaugaaau

SEQ ID NO: 149441 - RNA, 13 nt, Artificial Sequence
  Description of Artificial Sequence: Synthetic oligonucleotide
auauauuucucca

SEQ ID NO: 149442 - RNA, 10 nt, Artificial Sequence
  Description of Artificial Sequence: Synthetic oligonucleotide
caugaaggcu

SEQ ID NO: 149443 - RNA, 11 nt, Artificial Sequence
  Description of Artificial Sequence: Synthetic oligonucleotide
gcuggaguggu

SEQ ID NO: 149444 - RNA, 11 nt, Artificial Sequence
  Description of Artificial Sequence: Synthetic oligonucleotide
aggaagagagg

SEQ ID NO: 149445 - RNA, 12 nt, Artificial Sequence
  Description of Artificial Sequence: Synthetic oligonucleotide
cuugcaucgggc

SEQ ID NO: 149446 - RNA, 13 nt, Artificial Sequence
  Description of Artificial Sequence: Synthetic oligonucleotide
auauccuacugug

SEQ ID NO: 149447 - RNA, 13 nt, Artificial Sequence
  Description of Artificial Sequence: Synthetic oligonucleotide
uccuacuguguaa

SEQ ID NO: 149448 - RNA, 12 nt, Artificial Sequence
  Description of Artificial Sequence: Synthetic oligonucleotide
ccuuguagugua

SEQ ID NO: 149449 - RNA, 13 nt, Artificial Sequence
  Description of Artificial Sequence: Synthetic oligonucleotide
ucuuuguugauug

SEQ ID NO: 149450 - RNA, 14 nt, Artificial Sequence
  Description of Artificial Sequence: Synthetic oligonucleotide
uuuguugauugaaa

SEQ ID NO: 149451 - RNA, 15 nt, Artificial Sequence
  Description of Artificial Sequence: Synthetic oligonucleotide
uucuuuuucuuccau

SEQ ID NO: 149452 - RNA, 13 nt, Artificial Sequence
  Description of Artificial Sequence: Synthetic oligonucleotide
aaucuuccuucua

SEQ ID NO: 149453 - RNA, 13 nt, Artificial Sequence
  Description of Artificial Sequence: Synthetic oligonucleotide
uugaaugcuucau

SEQ ID NO: 149454 - RNA, 13 nt, Artificial Sequence
  Description of Artificial Sequence: Synthetic oligonucleotide
ugaaugcuucaug

SEQ ID NO: 149455 - RNA, 13 nt, Artificial Sequence
  Description of Artificial Sequence: Synthetic oligonucleotide
aauucuacuuuga

SEQ ID NO: 149456 - RNA, 13 nt, Artificial Sequence
  Description of Artificial Sequence: Synthetic oligonucleotide
agcaacuacagac

SEQ ID NO: 149457 - RNA, 13 nt, Artificial Sequence
  Description of Artificial Sequence: Synthetic oligonucleotide
gaccaaggucaac

SEQ ID NO: 149458 - RNA, 13 nt, Artificial Sequence
  Description of Artificial Sequence: Synthetic oligonucleotide
cgacuaucucgac

SEQ ID NO: 149459 - RNA, 13 nt, Artificial Sequence
  Description of Artificial Sequence: Synthetic oligonucleotide
aaccuucccaaac

SEQ ID NO: 149460 - RNA, 14 nt, Artificial Sequence
  Description of Artificial Sequence: Synthetic oligonucleotide
ccaagcuuagaacu

SEQ ID NO: 149461 - RNA, 15 nt, Artificial Sequence
  Description of Artificial Sequence: Synthetic oligonucleotide
agcuuagaacuuuaa

SEQ ID NO: 149462 - RNA, 11 nt, Artificial Sequence
  Description of Artificial Sequence: Synthetic oligonucleotide
aagaccaccac

SEQ ID NO: 149463 - RNA, 14 nt, Artificial Sequence
  Description of Artificial Sequence: Synthetic oligonucleotide
gcgagaaauaaagu

SEQ ID NO: 149464 - RNA, 14 nt, Artificial Sequence
  Description of Artificial Sequence: Synthetic oligonucleotide
cgagaaauaaaguu

SEQ ID NO: 149465 - RNA, 12 nt, Artificial Sequence
  Description of Artificial Sequence: Synthetic oligonucleotide
aggaaaugaucc

SEQ ID NO: 149466 - RNA, 13 nt, Artificial Sequence
  Description of Artificial Sequence: Synthetic oligonucleotide
gaagaaaugaaac

SEQ ID NO: 149467 - RNA, 13 nt, Artificial Sequence
  Description of Artificial Sequence: Synthetic oligonucleotide
guuuccauccucc

SEQ ID NO: 149468 - RNA, 15 nt, Artificial Sequence
  Description of Artificial Sequence: Synthetic oligonucleotide
acugaaaaucuuuga

SEQ ID NO: 149469 - RNA, 11 nt, Artificial Sequence
  Description of Artificial Sequence: Synthetic oligonucleotide
ugccguucagg

SEQ ID NO: 149470 - RNA, 13 nt, Artificial Sequence
  Description of Artificial Sequence: Synthetic oligonucleotide
caggguccagaag

SEQ ID NO: 149471 - RNA, 13 nt, Artificial Sequence
  Description of Artificial Sequence: Synthetic oligonucleotide
ucaagacugcuug

SEQ ID NO: 149472 - RNA, 13 nt, Artificial Sequence
  Description of Artificial Sequence: Synthetic oligonucleotide
uccaugucuuugg

SEQ ID NO: 149473 - RNA, 11 nt, Artificial Sequence
  Description of Artificial Sequence: Synthetic oligonucleotide
gccugaaacac

SEQ ID NO: 149474 - RNA, 12 nt, Artificial Sequence
  Description of Artificial Sequence: Synthetic oligonucleotide
ucucuguaccuc

SEQ ID NO: 149475 - RNA, 12 nt, Artificial Sequence
  Description of Artificial Sequence: Synthetic oligonucleotide
agcaagacaaga

SEQ ID NO: 149476 - RNA, 13 nt, Artificial Sequence
  Description of Artificial Sequence: Synthetic oligonucleotide
gcaagacaagaaa

SEQ ID NO: 149477 - RNA, 12 nt, Artificial Sequence
  Description of Artificial Sequence: Synthetic oligonucleotide
uguacaagaucc

SEQ ID NO: 149478 - RNA, 12 nt, Artificial Sequence
  Description of Artificial Sequence: Synthetic oligonucleotide
cguacuugcaga

SEQ ID NO: 149479 - RNA, 13 nt, Artificial Sequence
  Description of Artificial Sequence: Synthetic oligonucleotide
cgaucgauacaga

SEQ ID NO: 149480 - RNA, 13 nt, Artificial Sequence
  Description of Artificial Sequence: Synthetic oligonucleotide
uauaaaaauaaau

SEQ ID NO: 149481 - RNA, 13 nt, Artificial Sequence
  Description of Artificial Sequence: Synthetic oligonucleotide
uaaaaauaaauau

SEQ ID NO: 149482 - RNA, 13 nt, Artificial Sequence
  Description of Artificial Sequence: Synthetic oligonucleotide
uuugacugcugug

SEQ ID NO: 149483 - RNA, 13 nt, Artificial Sequence
  Description of Artificial Sequence: Synthetic oligonucleotide
ggagaugagagac

SEQ ID NO: 149484 - RNA, 10 nt, Artificial Sequence
  Description of Artificial Sequence: Synthetic oligonucleotide
ucccacuugg

SEQ ID NO: 149485 - RNA, 10 nt, Artificial Sequence
  Description of Artificial Sequence: Synthetic oligonucleotide
guucacggcc

SEQ ID NO: 149486 - RNA, 12 nt, Artificial Sequence
  Description of Artificial Sequence: Synthetic oligonucleotide
accaucacacca

SEQ ID NO: 149487 - RNA, 10 nt, Artificial Sequence
  Description of Artificial Sequence: Synthetic oligonucleotide
cugcggguuu

SEQ ID NO: 149488 - RNA, 9 nt, Artificial Sequence
  Description of Artificial Sequence: Synthetic oligonucleotide
uccaguuug

SEQ ID NO: 149489 - RNA, 12 nt, Artificial Sequence
  Description of Artificial Sequence: Synthetic oligonucleotide
uuaaggacuucu

SEQ ID NO: 149490 - RNA, 12 nt, Artificial Sequence
  Description of Artificial Sequence: Synthetic oligonucleotide
agugggacagag

SEQ ID NO: 149491 - RNA, 13 nt, Artificial Sequence
  Description of Artificial Sequence: Synthetic oligonucleotide
auuuguuauugug

SEQ ID NO: 149492 - RNA, 12 nt, Artificial Sequence
  Description of Artificial Sequence: Synthetic oligonucleotide
ucaaaugcauuu

SEQ ID NO: 149493 - RNA, 9 nt, Artificial Sequence
  Description of Artificial Sequence: Synthetic oligonucleotide
aggaaagcc

SEQ ID NO: 149494 - RNA, 10 nt, Artificial Sequence
  Description of Artificial Sequence: Synthetic oligonucleotide
ggaaagcccu

SEQ ID NO: 149495 - RNA, 11 nt, Artificial Sequence
  Description of Artificial Sequence: Synthetic oligonucleotide
ccagcauggcc

SEQ ID NO: 149496 - RNA, 10 nt, Artificial Sequence
  Description of Artificial Sequence: Synthetic oligonucleotide
uucucccuga

SEQ ID NO: 149497 - RNA, 11 nt, Artificial Sequence
  Description of Artificial Sequence: Synthetic oligonucleotide
aagaagcccuu

SEQ ID NO: 149498 - RNA, 11 nt, Artificial Sequence
  Description of Artificial Sequence: Synthetic oligonucleotide
gaagcccuuca

SEQ ID NO: 149499 - RNA, 10 nt, Artificial Sequence
  Description of Artificial Sequence: Synthetic oligonucleotide
cccuucagcg

SEQ ID NO: 149500 - RNA, 10 nt, Artificial Sequence
  Description of Artificial Sequence: Synthetic oligonucleotide
cuucagcggc

SEQ ID NO: 149501 - RNA, 11 nt, Artificial Sequence
  Description of Artificial Sequence: Synthetic oligonucleotide
cagcggccagu

SEQ ID NO: 149502 - RNA, 11 nt, Artificial Sequence
  Description of Artificial Sequence: Synthetic oligonucleotide
gaaaagcuccg

SEQ ID NO: 149503 - RNA, 10 nt, Artificial Sequence
  Description of Artificial Sequence: Synthetic oligonucleotide
aaagcuccgg

SEQ ID NO: 149504 - RNA, 12 nt, Artificial Sequence
  Description of Artificial Sequence: Synthetic oligonucleotide
gucaacagucug

SEQ ID NO: 149505 - RNA, 12 nt, Artificial Sequence
  Description of Artificial Sequence: Synthetic oligonucleotide
agaguucaaaag

SEQ ID NO: 149506 - RNA, 12 nt, Artificial Sequence
  Description of Artificial Sequence: Synthetic oligonucleotide
gaguucaaaagc

SEQ ID NO: 149507 - RNA, 11 nt, Artificial Sequence
  Description of Artificial Sequence: Synthetic oligonucleotide
ucaaaagcccu

SEQ ID NO: 149508 - RNA, 11 nt, Artificial Sequence
  Description of Artificial Sequence: Synthetic oligonucleotide
caaaagcccuu

SEQ ID NO: 149509 - RNA, 11 nt, Artificial Sequence
  Description of Artificial Sequence: Synthetic oligonucleotide
aaagcccuuca

SEQ ID NO: 149510 - RNA, 11 nt, Artificial Sequence
  Description of Artificial Sequence: Synthetic oligonucleotide
aagcccuucag

SEQ ID NO: 149511 - RNA, 12 nt, Artificial Sequence
  Description of Artificial Sequence: Synthetic oligonucleotide
ugaagccgcucg

SEQ ID NO: 149512 - RNA, 11 nt, Artificial Sequence
  Description of Artificial Sequence: Synthetic oligonucleotide
acgccagucaa

SEQ ID NO: 149513 - RNA, 12 nt, Artificial Sequence
  Description of Artificial Sequence: Synthetic oligonucleotide
ucuuggugcgug

SEQ ID NO: 149514 - RNA, 13 nt, Artificial Sequence
  Description of Artificial Sequence: Synthetic oligonucleotide
uuggauucaucag

SEQ ID NO: 149515 - RNA, 12 nt, Artificial Sequence
  Description of Artificial Sequence: Synthetic oligonucleotide
ggaauaccuaag

SEQ ID NO: 149516 - RNA, 11 nt, Artificial Sequence
  Description of Artificial Sequence: Synthetic oligonucleotide
uuugaggcuca

SEQ ID NO: 149517 - RNA, 10 nt, Artificial Sequence
  Description of Artificial Sequence: Synthetic oligonucleotide
cuacaauugg

SEQ ID NO: 149518 - RNA, 11 nt, Artificial Sequence
  Description of Artificial Sequence: Synthetic oligonucleotide
aguuaggagcc

SEQ ID NO: 149519 - RNA, 12 nt, Artificial Sequence
  Description of Artificial Sequence: Synthetic oligonucleotide
gucaauauccac

SEQ ID NO: 149520 - RNA, 12 nt, Artificial Sequence
  Description of Artificial Sequence: Synthetic oligonucleotide
uguucagucaca

SEQ ID NO: 149521 - RNA, 11 nt, Artificial Sequence
  Description of Artificial Sequence: Synthetic oligonucleotide
cacacacauac

SEQ ID NO: 149522 - RNA, 11 nt, Artificial Sequence
  Description of Artificial Sequence: Synthetic oligonucleotide
uccuuuugcuu

SEQ ID NO: 149523 - RNA, 15 nt, Artificial Sequence
  Description of Artificial Sequence: Synthetic oligonucleotide
uuuaaaguaauuuuu

SEQ ID NO: 149524 - RNA, 12 nt, Artificial Sequence
  Description of Artificial Sequence: Synthetic oligonucleotide
aacagucaaugg

SEQ ID NO: 149525 - RNA, 12 nt, Artificial Sequence
  Description of Artificial Sequence: Synthetic oligonucleotide
cgacaaaccaau

SEQ ID NO: 149526 - RNA, 11 nt, Artificial Sequence
  Description of Artificial Sequence: Synthetic oligonucleotide
cugcuaccacu

SEQ ID NO: 149527 - RNA, 12 nt, Artificial Sequence
  Description of Artificial Sequence: Synthetic oligonucleotide
caagcggucuua

SEQ ID NO: 149528 - RNA, 12 nt, Artificial Sequence
  Description of Artificial Sequence: Synthetic oligonucleotide
gucuuaccggcu

SEQ ID NO: 149529 - RNA, 10 nt, Artificial Sequence
  Description of Artificial Sequence: Synthetic oligonucleotide
auggguuacc

SEQ ID NO: 149530 - RNA, 10 nt, Artificial Sequence
  Description of Artificial Sequence: Synthetic oligonucleotide
uuaccugcga

SEQ ID NO: 149531 - RNA, 11 nt, Artificial Sequence
  Description of Artificial Sequence: Synthetic oligonucleotide
aucuugcugag

SEQ ID NO: 149532 - RNA, 12 nt, Artificial Sequence
  Description of Artificial Sequence: Synthetic oligonucleotide
gcauaaaacagu

SEQ ID NO: 149533 - RNA, 11 nt, Artificial Sequence
  Description of Artificial Sequence: Synthetic oligonucleotide
uccuuuauccu

SEQ ID NO: 149534 - RNA, 11 nt, Artificial Sequence
  Description of Artificial Sequence: Synthetic oligonucleotide
aacgcaaguug

SEQ ID NO: 149535 - RNA, 12 nt, Artificial Sequence
  Description of Artificial Sequence: Synthetic oligonucleotide
aacugaaaccau

SEQ ID NO: 149536 - RNA, 13 nt, Artificial Sequence
  Description of Artificial Sequence: Synthetic oligonucleotide
cuuuguuaaauau

SEQ ID NO: 149537 - RNA, 13 nt, Artificial Sequence
  Description of Artificial Sequence: Synthetic oligonucleotide
uauauuaaaaguu

SEQ ID NO: 149538 - RNA, 12 nt, Artificial Sequence
  Description of Artificial Sequence: Synthetic oligonucleotide
uuuugacuuaac

SEQ ID NO: 149539 - RNA, 12 nt, Artificial Sequence
  Description of Artificial Sequence: Synthetic oligonucleotide
caaacucagcac

SEQ ID NO: 149540 - RNA, 10 nt, Artificial Sequence
  Description of Artificial Sequence: Synthetic oligonucleotide
gcugaccuca

SEQ ID NO: 149541 - RNA, 13 nt, Artificial Sequence
  Description of Artificial Sequence: Synthetic oligonucleotide
uuauucagaucgc

SEQ ID NO: 149542 - RNA, 12 nt, Artificial Sequence
  Description of Artificial Sequence: Synthetic oligonucleotide
ggguucugggau

SEQ ID NO: 149543 - RNA, 14 nt, Artificial Sequence
  Description of Artificial Sequence: Synthetic oligonucleotide
uauuggaaauuaug

SEQ ID NO: 149544 - RNA, 12 nt, Artificial Sequence
  Description of Artificial Sequence: Synthetic oligonucleotide
uggaagcacuag

SEQ ID NO: 149545 - RNA, 12 nt, Artificial Sequence
  Description of Artificial Sequence: Synthetic oligonucleotide
uuuuuaugugga

SEQ ID NO: 149546 - RNA, 11 nt, Artificial Sequence
  Description of Artificial Sequence: Synthetic oligonucleotide
gaauugguaga

SEQ ID NO: 149547 - RNA, 12 nt, Artificial Sequence
  Description of Artificial Sequence: Synthetic oligonucleotide
uagacuuggaga

SEQ ID NO: 149548 - RNA, 12 nt, Artificial Sequence
  Description of Artificial Sequence: Synthetic oligonucleotide
uacaguauucca

SEQ ID NO: 149549 - RNA, 14 nt, Artificial Sequence
  Description of Artificial Sequence: Synthetic oligonucleotide
cacugaugaauuaa

SEQ ID NO: 149550 - RNA, 11 nt, Artificial Sequence
  Description of Artificial Sequence: Synthetic oligonucleotide
cacaucaucac

SEQ ID NO: 149551 - RNA, 12 nt, Artificial Sequence
  Description of Artificial Sequence: Synthetic oligonucleotide
ucaccaaacaga

SEQ ID NO: 149552 - RNA, 11 nt, Artificial Sequence
  Description of Artificial Sequence: Synthetic oligonucleotide
gaacaugaugg

SEQ ID NO: 149553 - RNA, 11 nt, Artificial Sequence
  Description of Artificial Sequence: Synthetic oligonucleotide
auguagacugc

SEQ ID NO: 149554 - RNA, 12 nt, Artificial Sequence
  Description of Artificial Sequence: Synthetic oligonucleotide
gaucuauuuaug

SEQ ID NO: 149555 - RNA, 11 nt, Artificial Sequence
  Description of Artificial Sequence: Synthetic oligonucleotide
cacuauuauca

SEQ ID NO: 149556 - RNA, 10 nt, Artificial Sequence
  Description of Artificial Sequence: Synthetic oligonucleotide
ucaguucugc

SEQ ID NO: 149557 - RNA, 12 nt, Artificial Sequence
  Description of Artificial Sequence: Synthetic oligonucleotide
gauuaaaccuac

SEQ ID NO: 149558 - RNA, 12 nt, Artificial Sequence
  Description of Artificial Sequence: Synthetic oligonucleotide
uaaaauccuucu

SEQ ID NO: 149559 - RNA, 11 nt, Artificial Sequence
  Description of Artificial Sequence: Synthetic oligonucleotide
augcuguagac

SEQ ID NO: 149560 - RNA, 12 nt, Artificial Sequence
  Description of Artificial Sequence: Synthetic oligonucleotide
ugauaggaauag

SEQ ID NO: 149561 - RNA, 10 nt, Artificial Sequence
  Description of Artificial Sequence: Synthetic oligonucleotide
auggcccuga

SEQ ID NO: 149562 - RNA, 10 nt, Artificial Sequence
  Description of Artificial Sequence: Synthetic oligonucleotide
uccucaagca

SEQ ID NO: 149563 - RNA, 9 nt, Artificial Sequence
  Description of Artificial Sequence: Synthetic oligonucleotide
uucagccca

SEQ ID NO: 149564 - RNA, 10 nt, Artificial Sequence
  Description of Artificial Sequence: Synthetic oligonucleotide
cugcugaacc

SEQ ID NO: 149565 - RNA, 11 nt, Artificial Sequence
  Description of Artificial Sequence: Synthetic oligonucleotide
aguucucuuca

SEQ ID NO: 149566 - RNA, 10 nt, Artificial Sequence
  Description of Artificial Sequence: Synthetic oligonucleotide
cagccuagag

SEQ ID NO: 149567 - RNA, 12 nt, Artificial Sequence
  Description of Artificial Sequence: Synthetic oligonucleotide
ucugugaagugu

SEQ ID NO: 149568 - RNA, 13 nt, Artificial Sequence
  Description of Artificial Sequence: Synthetic oligonucleotide
gagaaaauuucaa

SEQ ID NO: 149569 - RNA, 10 nt, Artificial Sequence
  Description of Artificial Sequence: Synthetic oligonucleotide
auccuccuga

SEQ ID NO: 149570 - RNA, 11 nt, Artificial Sequence
  Description of Artificial Sequence: Synthetic oligonucleotide
ugacaucauau

SEQ ID NO: 149571 - RNA, 12 nt, Artificial Sequence
  Description of Artificial Sequence: Synthetic oligonucleotide
aucuucaucaua

SEQ ID NO: 149572 - RNA, 12 nt, Artificial Sequence
  Description of Artificial Sequence: Synthetic oligonucleotide
acuagcuauuaa

SEQ ID NO: 149573 - RNA, 13 nt, Artificial Sequence
  Description of Artificial Sequence: Synthetic oligonucleotide
cucuacuaaaaau

SEQ ID NO: 149574 - RNA, 11 nt, Artificial Sequence
  Description of Artificial Sequence: Synthetic oligonucleotide
cuaucucgccu

SEQ ID NO: 149575 - RNA, 12 nt, Artificial Sequence
  Description of Artificial Sequence: Synthetic oligonucleotide
uucgguccaguu

SEQ ID NO: 149576 - RNA, 10 nt, Artificial Sequence
  Description of Artificial Sequence: Synthetic oligonucleotide
auguagccgc

SEQ ID NO: 149577 - RNA, 11 nt, Artificial Sequence
  Description of Artificial Sequence: Synthetic oligonucleotide
gaggagacuug

SEQ ID NO: 149578 - RNA, 11 nt, Artificial Sequence
  Description of Artificial Sequence: Synthetic oligonucleotide
aguagugagga

SEQ ID NO: 149579 - RNA, 13 nt, Artificial Sequence
  Description of Artificial Sequence: Synthetic oligonucleotide
agaugaguacaaa

SEQ ID NO: 149580 - RNA, 12 nt, Artificial Sequence
  Description of Artificial Sequence: Synthetic oligonucleotide
uuguuaaugggc

SEQ ID NO: 149581 - RNA, 12 nt, Artificial Sequence
  Description of Artificial Sequence: Synthetic oligonucleotide
uuuuaauuuauu

SEQ ID NO: 149582 - RNA, 11 nt, Artificial Sequence
  Description of Artificial Sequence: Synthetic oligonucleotide
auuuaaauaug

SEQ ID NO: 149583 - RNA, 12 nt, Artificial Sequence
  Description of Artificial Sequence: Synthetic oligonucleotide
auccuuuguuuc

SEQ ID NO: 149584 - RNA, 13 nt, Artificial Sequence
  Description of Artificial Sequence: Synthetic oligonucleotide
gucuaaguguuug

SEQ ID NO: 149585 - RNA, 11 nt, Artificial Sequence
  Description of Artificial Sequence: Synthetic oligonucleotide
ccugugacaaa

SEQ ID NO: 149586 - RNA, 12 nt, Artificial Sequence
  Description of Artificial Sequence: Synthetic oligonucleotide
caggcugaauua

SEQ ID NO: 149587 - RNA, 13 nt, Artificial Sequence
  Description of Artificial Sequence: Synthetic oligonucleotide
ucauucuuacaau

SEQ ID NO: 149588 - RNA, 14 nt, Artificial Sequence
  Description of Artificial Sequence: Synthetic oligonucleotide
cauucuuacaauug

SEQ ID NO: 149589 - RNA, 11 nt, Artificial Sequence
  Description of Artificial Sequence: Synthetic oligonucleotide
agagaguguac

SEQ ID NO: 149590 - RNA, 11 nt, Artificial Sequence
  Description of Artificial Sequence: Synthetic oligonucleotide
gaacucagcag

SEQ ID NO: 149591 - RNA, 12 nt, Artificial Sequence
  Description of Artificial Sequence: Synthetic oligonucleotide
uuauuuucagua

SEQ ID NO: 149592 - RNA, 11 nt, Artificial Sequence
  Description of Artificial Sequence: Synthetic oligonucleotide
cuuaaauggaa

SEQ ID NO: 149593 - RNA, 12 nt, Artificial Sequence
  Description of Artificial Sequence: Synthetic oligonucleotide
gccuaaaauugu

SEQ ID NO: 149594 - RNA, 12 nt, Artificial Sequence
  Description of Artificial Sequence: Synthetic oligonucleotide
acuaacaucugg

SEQ ID NO: 149595 - RNA, 11 nt, Artificial Sequence
  Description of Artificial Sequence: Synthetic oligonucleotide
gacugugagcu

SEQ ID NO: 149596 - RNA, 13 nt, Artificial Sequence
  Description of Artificial Sequence: Synthetic oligonucleotide
gcuuuuuauuaau

SEQ ID NO: 149597 - RNA, 12 nt, Artificial Sequence
  Description of Artificial Sequence: Synthetic oligonucleotide
ucuucuuacauu

SEQ ID NO: 149598 - RNA, 14 nt, Artificial Sequence
  Description of Artificial Sequence: Synthetic oligonucleotide
auuuguaaaaaugu

SEQ ID NO: 149599 - RNA, 14 nt, Artificial Sequence
  Description of Artificial Sequence: Synthetic oligonucleotide
ucuuaauucauauu

SEQ ID NO: 149600 - RNA, 12 nt, Artificial Sequence
  Description of Artificial Sequence: Synthetic oligonucleotide
aacuaaucauga

SEQ ID NO: 149601 - RNA, 11 nt, Artificial Sequence
  Description of Artificial Sequence: Synthetic oligonucleotide
cugcucuuggg

SEQ ID NO: 149602 - RNA, 12 nt, Artificial Sequence
  Description of Artificial Sequence: Synthetic oligonucleotide
aguagcuuugag

SEQ ID NO: 149603 - RNA, 13 nt, Artificial Sequence
  Description of Artificial Sequence: Synthetic oligonucleotide
acguaauauuuca

SEQ ID NO: 149604 - RNA, 12 nt, Artificial Sequence
  Description of Artificial Sequence: Synthetic oligonucleotide
auucucuucacu

SEQ ID NO: 149605 - RNA, 13 nt, Artificial Sequence
  Description of Artificial Sequence: Synthetic oligonucleotide
uaaugcuaagaaa

SEQ ID NO: 149606 - RNA, 11 nt, Artificial Sequence
  Description of Artificial Sequence: Synthetic oligonucleotide
cugaaaaucaa

SEQ ID NO: 149607 - RNA, 13 nt, Artificial Sequence
  Description of Artificial Sequence: Synthetic oligonucleotide
auaugauuacuuu

SEQ ID NO: 149608 - RNA, 13 nt, Artificial Sequence
  Description of Artificial Sequence: Synthetic oligonucleotide
auuuuguucuaca

SEQ ID NO: 149609 - RNA, 11 nt, Artificial Sequence
  Description of Artificial Sequence: Synthetic oligonucleotide
ccgggacucuc

SEQ ID NO: 149610 - RNA, 13 nt, Artificial Sequence
  Description of Artificial Sequence: Synthetic oligonucleotide
cuuuaaaguaaag

SEQ ID NO: 149611 - RNA, 12 nt, Artificial Sequence
  Description of Artificial Sequence: Synthetic oligonucleotide
cuggaagccugg

SEQ ID NO: 149612 - RNA, 13 nt, Artificial Sequence
  Description of Artificial Sequence: Synthetic oligonucleotide
aaacaaaagagag

SEQ ID NO: 149613 - RNA, 12 nt, Artificial Sequence
  Description of Artificial Sequence: Synthetic oligonucleotide
ucaguuaugccg

SEQ ID NO: 149614 - RNA, 12 nt, Artificial Sequence
  Description of Artificial Sequence: Synthetic oligonucleotide
aaaagaagucca

SEQ ID NO: 149615 - RNA, 10 nt, Artificial Sequence
  Description of Artificial Sequence: Synthetic oligonucleotide
ggugagguua

SEQ ID NO: 149616 - RNA, 10 nt, Artificial Sequence
  Description of Artificial Sequence: Synthetic oligonucleotide
ggaagaggac

SEQ ID NO: 149617 - RNA, 12 nt, Artificial Sequence
  Description of Artificial Sequence: Synthetic oligonucleotide
agcaaguauugu

SEQ ID NO: 149618 - RNA, 11 nt, Artificial Sequence
  Description of Artificial Sequence: Synthetic oligonucleotide
uuguagcacuc

SEQ ID NO: 149619 - RNA, 13 nt, Artificial Sequence
  Description of Artificial Sequence: Synthetic oligonucleotide
caaaaccacaaau

SEQ ID NO: 149620 - RNA, 11 nt, Artificial Sequence
  Description of Artificial Sequence: Synthetic oligonucleotide
aagcccauaca

SEQ ID NO: 149621 - RNA, 10 nt, Artificial Sequence
  Description of Artificial Sequence: Synthetic oligonucleotide
gcccauacag

SEQ ID NO: 149622 - RNA, 11 nt, Artificial Sequence
  Description of Artificial Sequence: Synthetic oligonucleotide
agaaaccuucc

SEQ ID NO: 149623 - RNA, 9 nt, Artificial Sequence
  Description of Artificial Sequence: Synthetic oligonucleotide
uauaccuac

SEQ ID NO: 149624 - RNA, 12 nt, Artificial Sequence
  Description of Artificial Sequence: Synthetic oligonucleotide
ccaguuuucgga

SEQ ID NO: 149625 - RNA, 8 nt, Artificial Sequence
  Description of Artificial Sequence: Synthetic oligonucleotide
gaacaggg

SEQ ID NO: 149626 - RNA, 12 nt, Artificial Sequence
  Description of Artificial Sequence: Synthetic oligonucleotide
uaacuuuccagu

SEQ ID NO: 149627 - RNA, 13 nt, Artificial Sequence
  Description of Artificial Sequence: Synthetic oligonucleotide
aaguuugguuuug

SEQ ID NO: 149628 - RNA, 11 nt, Artificial Sequence
  Description of Artificial Sequence: Synthetic oligonucleotide
uucccacugua

SEQ ID NO: 149629 - RNA, 12 nt, Artificial Sequence
  Description of Artificial Sequence: Synthetic oligonucleotide
gauaccauauga

SEQ ID NO: 149630 - RNA, 10 nt, Artificial Sequence
  Description of Artificial Sequence: Synthetic oligonucleotide
acaugggcug

SEQ ID NO: 149631 - RNA, 12 nt, Artificial Sequence
  Description of Artificial Sequence: Synthetic oligonucleotide
aacuuuuucaua

SEQ ID NO: 149632 - RNA, 11 nt, Artificial Sequence
  Description of Artificial Sequence: Synthetic oligonucleotide
augaggccgga

SEQ ID NO: 149633 - RNA, 10 nt, Artificial Sequence
  Description of Artificial Sequence: Synthetic oligonucleotide
cugcauuugu

SEQ ID NO: 149634 - RNA, 12 nt, Artificial Sequence
  Description of Artificial Sequence: Synthetic oligonucleotide
auguuuacuacc

SEQ ID NO: 149635 - RNA, 14 nt, Artificial Sequence
  Description of Artificial Sequence: Synthetic oligonucleotide
auuuuuugaugaaa

SEQ ID NO: 149636 - RNA, 13 nt, Artificial Sequence
  Description of Artificial Sequence: Synthetic oligonucleotide
agugugugaauuu

SEQ ID NO: 149637 - RNA, 12 nt, Artificial Sequence
  Description of Artificial Sequence: Synthetic oligonucleotide
agcaauguaugu

SEQ ID NO: 149638 - RNA, 13 nt, Artificial Sequence
  Description of Artificial Sequence: Synthetic oligonucleotide
aagcacauauaua

SEQ ID NO: 149639 - RNA, 13 nt, Artificial Sequence
  Description of Artificial Sequence: Synthetic oligonucleotide
uaauaguuucucc

SEQ ID NO: 149640 - RNA, 12 nt, Artificial Sequence
  Description of Artificial Sequence: Synthetic oligonucleotide
guuucuccaaau

SEQ ID NO: 149641 - RNA, 12 nt, Artificial Sequence
  Description of Artificial Sequence: Synthetic oligonucleotide
acuuccuagaaa

SEQ ID NO: 149642 - RNA, 12 nt, Artificial Sequence
  Description of Artificial Sequence: Synthetic oligonucleotide
acaccauauaug

SEQ ID NO: 149643 - RNA, 13 nt, Artificial Sequence
  Description of Artificial Sequence: Synthetic oligonucleotide
uauaugaauggag

SEQ ID NO: 149644 - RNA, 12 nt, Artificial Sequence
  Description of Artificial Sequence: Synthetic oligonucleotide
cauuuacaggga

SEQ ID NO: 149645 - RNA, 12 nt, Artificial Sequence
  Description of Artificial Sequence: Synthetic oligonucleotide
auuuacagggac

SEQ ID NO: 149646 - RNA, 9 nt, Artificial Sequence
  Description of Artificial Sequence: Synthetic oligonucleotide
gggaccuga

SEQ ID NO: 149647 - RNA, 13 nt, Artificial Sequence
  Description of Artificial Sequence: Synthetic oligonucleotide
guuugacugcauc

SEQ ID NO: 149648 - RNA, 12 nt, Artificial Sequence
  Description of Artificial Sequence: Synthetic oligonucleotide
uugacugcaucg

SEQ ID NO: 149649 - RNA, 11 nt, Artificial Sequence
  Description of Artificial Sequence: Synthetic oligonucleotide
aguucacaggg

SEQ ID NO: 149650 - RNA, 12 nt, Artificial Sequence
  Description of Artificial Sequence: Synthetic oligonucleotide
gcaccucugucc

SEQ ID NO: 149651 - RNA, 14 nt, Artificial Sequence
  Description of Artificial Sequence: Synthetic oligonucleotide
guuugucuuuuuaa

SEQ ID NO: 149652 - RNA, 13 nt, Artificial Sequence
  Description of Artificial Sequence: Synthetic oligonucleotide
uugucuuuuuaag

SEQ ID NO: 149653 - RNA, 12 nt, Artificial Sequence
  Description of Artificial Sequence: Synthetic oligonucleotide
cuaaagguuguc

SEQ ID NO: 149654 - RNA, 11 nt, Artificial Sequence
  Description of Artificial Sequence: Synthetic oligonucleotide
agguugucgac

SEQ ID NO: 149655 - RNA, 12 nt, Artificial Sequence
  Description of Artificial Sequence: Synthetic oligonucleotide
ccuggcaauugu

SEQ ID NO: 149656 - RNA, 11 nt, Artificial Sequence
  Description of Artificial Sequence: Synthetic oligonucleotide
guggugcgagg

SEQ ID NO: 149657 - RNA, 12 nt, Artificial Sequence
  Description of Artificial Sequence: Synthetic oligonucleotide
gagacaugaaau

SEQ ID NO: 149658 - RNA, 12 nt, Artificial Sequence
  Description of Artificial Sequence: Synthetic oligonucleotide
uauauuucucca

SEQ ID NO: 149659 - RNA, 9 nt, Artificial Sequence
  Description of Artificial Sequence: Synthetic oligonucleotide
augaaggcu

SEQ ID NO: 149660 - RNA, 10 nt, Artificial Sequence
  Description of Artificial Sequence: Synthetic oligonucleotide
cuggaguggu

SEQ ID NO: 149661 - RNA, 10 nt, Artificial Sequence
  Description of Artificial Sequence: Synthetic oligonucleotide
ggaagagagg

SEQ ID NO: 149662 - RNA, 11 nt, Artificial Sequence
  Description of Artificial Sequence: Synthetic oligonucleotide
uugcaucgggc

SEQ ID NO: 149663 - RNA, 12 nt, Artificial Sequence
  Description of Artificial Sequence: Synthetic oligonucleotide
uauccuacugug

SEQ ID NO: 149664 - RNA, 12 nt, Artificial Sequence
  Description of Artificial Sequence: Synthetic oligonucleotide
ccuacuguguaa

SEQ ID NO: 149665 - RNA, 11 nt, Artificial Sequence
  Description of Artificial Sequence: Synthetic oligonucleotide
cuuguagugua

SEQ ID NO: 149666 - RNA, 12 nt, Artificial Sequence
  Description of Artificial Sequence: Synthetic oligonucleotide
cuuuguugauug

SEQ ID NO: 149667 - RNA, 13 nt, Artificial Sequence
  Description of Artificial Sequence: Synthetic oligonucleotide
uuguugauugaaa

SEQ ID NO: 149668 - RNA, 14 nt, Artificial Sequence
  Description of Artificial Sequence: Synthetic oligonucleotide
ucuuuuucuuccau

SEQ ID NO: 149669 - RNA, 12 nt, Artificial Sequence
  Description of Artificial Sequence: Synthetic oligonucleotide
aucuuccuucua

SEQ ID NO: 149670 - RNA, 12 nt, Artificial Sequence
  Description of Artificial Sequence: Synthetic oligonucleotide
ugaaugcuucau

SEQ ID NO: 149671 - RNA, 12 nt, Artificial Sequence
  Description of Artificial Sequence: Synthetic oligonucleotide
gaaugcuucaug

SEQ ID NO: 149672 - RNA, 12 nt, Artificial Sequence
  Description of Artificial Sequence: Synthetic oligonucleotide
auucuacuuuga

SEQ ID NO: 149673 - RNA, 12 nt, Artificial Sequence
  Description of Artificial Sequence: Synthetic oligonucleotide
gcaacuacagac

SEQ ID NO: 149674 - RNA, 12 nt, Artificial Sequence
  Description of Artificial Sequence: Synthetic oligonucleotide
accaaggucaac

SEQ ID NO: 149675 - RNA, 12 nt, Artificial Sequence
  Description of Artificial Sequence: Synthetic oligonucleotide
gacuaucucgac

SEQ ID NO: 149676 - RNA, 12 nt, Artificial Sequence
  Description of Artificial Sequence: Synthetic oligonucleotide
accuucccaaac

SEQ ID NO: 149677 - RNA, 13 nt, Artificial Sequence
  Description of Artificial Sequence: Synthetic oligonucleotide
caagcuuagaacu

SEQ ID NO: 149678 - RNA, 14 nt, Artificial Sequence
  Description of Artificial Sequence: Synthetic oligonucleotide
gcuuagaacuuuaa

SEQ ID NO: 149679 - RNA, 13 nt, Artificial Sequence
  Description of Artificial Sequence: Synthetic oligonucleotide
aacuuuaagcaac

SEQ ID NO: 149680 - RNA, 10 nt, Artificial Sequence
  Description of Artificial Sequence: Synthetic oligonucleotide
agaccaccac

SEQ ID NO: 149681 - RNA, 13 nt, Artificial Sequence
  Description of Artificial Sequence: Synthetic oligonucleotide
cgagaaauaaagu

SEQ ID NO: 149682 - RNA, 13 nt, Artificial Sequence
  Description of Artificial Sequence: Synthetic oligonucleotide
gagaaauaaaguu

SEQ ID NO: 149683 - RNA, 11 nt, Artificial Sequence
  Description of Artificial Sequence: Synthetic oligonucleotide
ggaaaugaucc

SEQ ID NO: 149684 - RNA, 12 nt, Artificial Sequence
  Description of Artificial Sequence: Synthetic oligonucleotide
aagaaaugaaac

SEQ ID NO: 149685 - RNA, 12 nt, Artificial Sequence
  Description of Artificial Sequence: Synthetic oligonucleotide
uuuccauccucc

SEQ ID NO: 149686 - RNA, 14 nt, Artificial Sequence
  Description of Artificial Sequence: Synthetic oligonucleotide
cugaaaaucuuuga

SEQ ID NO: 149687 - RNA, 10 nt, Artificial Sequence
  Description of Artificial Sequence: Synthetic oligonucleotide
gccguucagg

SEQ ID NO: 149688 - RNA, 12 nt, Artificial Sequence
  Description of Artificial Sequence: Synthetic oligonucleotide
aggguccagaag

SEQ ID NO: 149689 - RNA, 12 nt, Artificial Sequence
  Description of Artificial Sequence: Synthetic oligonucleotide
caagacugcuug

SEQ ID NO: 149690 - RNA, 12 nt, Artificial Sequence
  Description of Artificial Sequence: Synthetic oligonucleotide
ccaugucuuugg

SEQ ID NO: 149691 - RNA, 10 nt, Artificial Sequence
  Description of Artificial Sequence: Synthetic oligonucleotide
ccugaaacac

SEQ ID NO: 149692 - RNA, 11 nt, Artificial Sequence
  Description of Artificial Sequence: Synthetic oligonucleotide
cucuguaccuc

SEQ ID NO: 149693 - RNA, 11 nt, Artificial Sequence
  Description of Artificial Sequence: Synthetic oligonucleotide
gcaagacaaga

SEQ ID NO: 149694 - RNA, 12 nt, Artificial Sequence
  Description of Artificial Sequence: Synthetic oligonucleotide
caagacaagaaa

SEQ ID NO: 149695 - RNA, 11 nt, Artificial Sequence
  Description of Artificial Sequence: Synthetic oligonucleotide
guacaagaucc

SEQ ID NO: 149696 - RNA, 11 nt, Artificial Sequence
  Description of Artificial Sequence: Synthetic oligonucleotide
guacuugcaga

SEQ ID NO: 149697 - RNA, 12 nt, Artificial Sequence
  Description of Artificial Sequence: Synthetic oligonucleotide
gaucgauacaga

SEQ ID NO: 149698 - RNA, 12 nt, Artificial Sequence
  Description of Artificial Sequence: Synthetic oligonucleotide
auaaaaauaaau

SEQ ID NO: 149699 - RNA, 12 nt, Artificial Sequence
  Description of Artificial Sequence: Synthetic oligonucleotide
aaaaauaaauau

SEQ ID NO: 149700 - RNA, 12 nt, Artificial Sequence
  Description of Artificial Sequence: Synthetic oligonucleotide
uugacugcugug

SEQ ID NO: 149701 - RNA, 12 nt, Artificial Sequence
  Description of Artificial Sequence: Synthetic oligonucleotide
gagaugagagac

SEQ ID NO: 149702 - RNA, 9 nt, Artificial Sequence
  Description of Artificial Sequence: Synthetic oligonucleotide
cccacuugg

SEQ ID NO: 149703 - RNA, 771 nt, Homo sapiens
agagaagcagacaucuucuaguuccucccccacucuccucuuuccgguaccugugagucagcuaggggagggcagcucucacccaggcugauaguucggugaccuggcuuuaucuacuggaugaguuccgcugggagauggaacauagcacguuucucucuggccugguacuggcuacccuucucucgcaagugagccccuucaagauaccuauagaggaacuugaggacagaguguuugugaauugcaauaccagcaucacauggguagagggaacggugggaacacugcucucagacauuacaagacuggaccugggaaaacgcauccuggacccacgaggaauauauagguguaaugggacagauauauacaaggacaaagaaucuaccgugcaaguucauuaucgaaugugccagagcuguguggagcuggauccagccaccguggcuggcaucauugucacugaugucauugccacucugcuccuugcuuugggagucuucugcuuugcuggacaugagacuggaaggcugucuggggcugccgacacacaagcucuguugaggaaugaccaggucuaucagccccuccgagaucgagaugaugcucaguacagccaccuuggaggaaacugggcucggaacaagugaaccugagacugguggcuucuagaagcagccauuaccaacuguaccuucccuucuugcucagccaauaaauauauccucuuucacucagaaaaaaaaaaaaaaaaaaaaaaaaaaaaaa

SEQ ID NO: 149704 - RNA, 19 nt, Artificial Sequence
  Description of Artificial Sequence: Synthetic oligonucleotide
agagaagcagacaucuucu

SEQ ID NO: 149705 - RNA, 19 nt, Artificial Sequence
  Description of Artificial Sequence: Synthetic oligonucleotide
uaguuccucccccacucuc

SEQ ID NO: 149706 - RNA, 19 nt, Artificial Sequence
  Description of Artificial Sequence: Synthetic oligonucleotide
ccucuuuccgguaccugug

SEQ ID NO: 149707 - RNA, 19 nt, Artificial Sequence
  Description of Artificial Sequence: Synthetic oligonucleotide
gagucagcuaggggagggc

SEQ ID NO: 149708 - RNA, 19 nt, Artificial Sequence
  Description of Artificial Sequence: Synthetic oligonucleotide
cagcucucacccaggcuga

SEQ ID NO: 149709 - RNA, 19 nt, Artificial Sequence
  Description of Artificial Sequence: Synthetic oligonucleotide
auaguucggugaccuggcu

SEQ ID NO: 149710 - RNA, 19 nt, Artificial Sequence
  Description of Artificial Sequence: Synthetic oligonucleotide
uuuaucuacuggaugaguu

SEQ ID NO: 149711 - RNA, 19 nt, Artificial Sequence
  Description of Artificial Sequence: Synthetic oligonucleotide
uccgcugggagauggaaca

SEQ ID NO: 149712 - RNA, 19 nt, Artificial Sequence
  Description of Artificial Sequence: Synthetic oligonucleotide
auagcacguuucucucugg

SEQ ID NO: 149713 - RNA, 19 nt, Artificial Sequence
  Description of Artificial Sequence: Synthetic oligonucleotide
gccugguacuggcuacccu

SEQ ID NO: 149714 - RNA, 19 nt, Artificial Sequence
  Description of Artificial Sequence: Synthetic oligonucleotide
uucucucgcaagugagccc

SEQ ID NO: 149715 - RNA, 19 nt, Artificial Sequence
  Description of Artificial Sequence: Synthetic oligonucleotide
ccuucaagauaccuauaga

SEQ ID NO: 149716 - RNA, 19 nt, Artificial Sequence
  Description of Artificial Sequence: Synthetic oligonucleotide
aggaacuugaggacagagu

SEQ ID NO: 149717 - RNA, 19 nt, Artificial Sequence
  Description of Artificial Sequence: Synthetic oligonucleotide
uguuugugaauugcaauac

SEQ ID NO: 149718 - RNA, 19 nt, Artificial Sequence
  Description of Artificial Sequence: Synthetic oligonucleotide
ccagcaucacauggguaga

SEQ ID NO: 149719 - RNA, 19 nt, Artificial Sequence
  Description of Artificial Sequence: Synthetic oligonucleotide
agggaacggugggaacacu

SEQ ID NO: 149720 - RNA, 19 nt, Artificial Sequence
  Description of Artificial Sequence: Synthetic oligonucleotide
ugcucucagacauuacaag

SEQ ID NO: 149721 - RNA, 19 nt, Artificial Sequence
  Description of Artificial Sequence: Synthetic oligonucleotide
gacuggaccugggaaaacg

SEQ ID NO: 149722 - RNA, 19 nt, Artificial Sequence
  Description of Artificial Sequence: Synthetic oligonucleotide
gcauccuggacccacgagg

SEQ ID NO: 149723 - RNA, 19 nt, Artificial Sequence
  Description of Artificial Sequence: Synthetic oligonucleotide
gaauauauagguguaaugg

SEQ ID NO: 149724 - RNA, 19 nt, Artificial Sequence
  Description of Artificial Sequence: Synthetic oligonucleotide
ggacagauauauacaagga

SEQ ID NO: 149725 - RNA, 19 nt, Artificial Sequence
  Description of Artificial Sequence: Synthetic oligonucleotide
acaaagaaucuaccgugca

SEQ ID NO: 149726 - RNA, 19 nt, Artificial Sequence
  Description of Artificial Sequence: Synthetic oligonucleotide
aaguucauuaucgaaugug

SEQ ID NO: 149727 - RNA, 19 nt, Artificial Sequence
  Description of Artificial Sequence: Synthetic oligonucleotide
gccagagcuguguggagcu

SEQ ID NO: 149728 - RNA, 19 nt, Artificial Sequence
  Description of Artificial Sequence: Synthetic oligonucleotide
uggauccagccaccguggc

SEQ ID NO: 149729 - RNA, 19 nt, Artificial Sequence
  Description of Artificial Sequence: Synthetic oligonucleotide
cuggcaucauugucacuga

SEQ ID NO: 149730 - RNA, 19 nt, Artificial Sequence
  Description of Artificial Sequence: Synthetic oligonucleotide
augucauugccacucugcu

SEQ ID NO: 149731 - RNA, 19 nt, Artificial Sequence
  Description of Artificial Sequence: Synthetic oligonucleotide
uccuugcuuugggagucuu

SEQ ID NO: 149732 - RNA, 19 nt, Artificial Sequence
  Description of Artificial Sequence: Synthetic oligonucleotide
ucugcuuugcuggacauga

SEQ ID NO: 149733 - RNA, 19 nt, Artificial Sequence
  Description of Artificial Sequence: Synthetic oligonucleotide
agacuggaaggcugucugg

SEQ ID NO: 149734 - RNA, 19 nt, Artificial Sequence
  Description of Artificial Sequence: Synthetic oligonucleotide
gggcugccgacacacaagc

SEQ ID NO: 149735 - RNA, 19 nt, Artificial Sequence
  Description of Artificial Sequence: Synthetic oligonucleotide
cucuguugaggaaugacca

SEQ ID NO: 149736 - RNA, 19 nt, Artificial Sequence
  Description of Artificial Sequence: Synthetic oligonucleotide
aggucuaucagccccuccg

SEQ ID NO: 149737 - RNA, 19 nt, Artificial Sequence
  Description of Artificial Sequence: Synthetic oligonucleotide
gagaucgagaugaugcuca

SEQ ID NO: 149738 - RNA, 19 nt, Artificial Sequence
  Description of Artificial Sequence: Synthetic oligonucleotide
aguacagccaccuuggagg

SEQ ID NO: 149739 - RNA, 19 nt, Artificial Sequence
  Description of Artificial Sequence: Synthetic oligonucleotide
gaaacugggcucggaacaa

SEQ ID NO: 149740 - RNA, 19 nt, Artificial Sequence
  Description of Artificial Sequence: Synthetic oligonucleotide
agugaaccugagacuggug

SEQ ID NO: 149741 - RNA, 19 nt, Artificial Sequence
  Description of Artificial Sequence: Synthetic oligonucleotide
ggcuucuagaagcagccau

SEQ ID NO: 149742 - RNA, 19 nt, Artificial Sequence
  Description of Artificial Sequence: Synthetic oligonucleotide
uuaccaacuguaccuuccc

SEQ ID NO: 149743 - RNA, 19 nt, Artificial Sequence
  Description of Artificial Sequence: Synthetic oligonucleotide
cuucuugcucagccaauaa

SEQ ID NO: 149744 - RNA, 19 nt, Artificial Sequence
  Description of Artificial Sequence: Synthetic oligonucleotide
aauauauccucuuucacuc

SEQ ID NO: 149745 - RNA, 25 nt, Artificial Sequence
  Description of Artificial Sequence: Synthetic oligonucleotide
agagaagcagacaucuucuaguucc

SEQ ID NO: 149746 - RNA, 25 nt, Artificial Sequence
  Description of Artificial Sequence: Synthetic oligonucleotide
cucccccacucuccucuuuccggua

SEQ ID NO: 149747 - RNA, 25 nt, Artificial Sequence
  Description of Artificial Sequence: Synthetic oligonucleotide
accugugagucagcuaggggagggc

SEQ ID NO: 149748 - RNA, 25 nt, Artificial Sequence
  Description of Artificial Sequence: Synthetic oligonucleotide
cagcucucacccaggcugauaguuc

SEQ ID NO: 149749 - RNA, 25 nt, Artificial Sequence
  Description of Artificial Sequence: Synthetic oligonucleotide
cggugaccuggcuuuaucuacugga

SEQ ID NO: 149750 - RNA, 25 nt, Artificial Sequence
  Description of Artificial Sequence: Synthetic oligonucleotide
augaguuccgcugggagauggaaca

SEQ ID NO: 149751 - RNA, 25 nt, Artificial Sequence
  Description of Artificial Sequence: Synthetic oligonucleotide
auagcacguuucucucuggccuggu

SEQ ID NO: 149752 - RNA, 25 nt, Artificial Sequence
  Description of Artificial Sequence: Synthetic oligonucleotide
uacuggcuacccuucucucgcaagu

SEQ ID NO: 149753 - RNA, 25 nt, Artificial Sequence
  Description of Artificial Sequence: Synthetic oligonucleotide
ugagccccuucaagauaccuauaga

SEQ ID NO: 149754 - RNA, 25 nt, Artificial Sequence
  Description of Artificial Sequence: Synthetic oligonucleotide
aggaacuugaggacagaguguuugu

SEQ ID NO: 149755 - RNA, 25 nt, Artificial Sequence
  Description of Artificial Sequence: Synthetic oligonucleotide
ugaauugcaauaccagcaucacaug

SEQ ID NO: 149756 - RNA, 25 nt, Artificial Sequence
  Description of Artificial Sequence: Synthetic oligonucleotide
ggguagagggaacggugggaacacu

SEQ ID NO: 149757 - RNA, 25 nt, Artificial Sequence
  Description of Artificial Sequence: Synthetic oligonucleotide
ugcucucagacauuacaagacugga

SEQ ID NO: 149758 - RNA, 25 nt, Artificial Sequence
  Description of Artificial Sequence: Synthetic oligonucleotide
accugggaaaacgcauccuggaccc

SEQ ID NO: 149759 - RNA, 25 nt, Artificial Sequence
  Description of Artificial Sequence: Synthetic oligonucleotide
cacgaggaauauauagguguaaugg

SEQ ID NO: 149760 - RNA, 25 nt, Artificial Sequence
  Description of Artificial Sequence: Synthetic oligonucleotide
ggacagauauauacaaggacaaaga

SEQ ID NO: 149761 - RNA, 25 nt, Artificial Sequence
  Description of Artificial Sequence: Synthetic oligonucleotide
aaucuaccgugcaaguucauuaucg

SEQ ID NO: 149762 - RNA, 25 nt, Artificial Sequence
  Description of Artificial Sequence: Synthetic oligonucleotide
gaaugugccagagcuguguggagcu

SEQ ID NO: 149763 - RNA, 25 nt, Artificial Sequence
  Description of Artificial Sequence: Synthetic oligonucleotide
uggauccagccaccguggcuggcau

SEQ ID NO: 149764 - RNA, 25 nt, Artificial Sequence
  Description of Artificial Sequence: Synthetic oligonucleotide
ucauugucacugaugucauugccac

SEQ ID NO: 149765 - RNA, 25 nt, Artificial Sequence
  Description of Artificial Sequence: Synthetic oligonucleotide
cucugcuccuugcuuugggagucuu

SEQ ID NO: 149766 - RNA, 25 nt, Artificial Sequence
  Description of Artificial Sequence: Synthetic oligonucleotide
ucugcuuugcuggacaugagacugg

SEQ ID NO: 149767 - RNA, 25 nt, Artificial Sequence
  Description of Artificial Sequence: Synthetic oligonucleotide
gaaggcugucuggggcugccgacac

SEQ ID NO: 149768 - RNA, 25 nt, Artificial Sequence
  Description of Artificial Sequence: Synthetic oligonucleotide
cacaagcucuguugaggaaugacca

SEQ ID NO: 149769 - RNA, 25 nt, Artificial Sequence
  Description of Artificial Sequence: Synthetic oligonucleotide
aggucuaucagccccuccgagaucg

SEQ ID NO: 149770 - RNA, 25 nt, Artificial Sequence
  Description of Artificial Sequence: Synthetic oligonucleotide
gagaugaugcucaguacagccaccu

SEQ ID NO: 149771 - RNA, 25 nt, Artificial Sequence
  Description of Artificial Sequence: Synthetic oligonucleotide
uuggaggaaacugggcucggaacaa

SEQ ID NO: 149772 - RNA, 25 nt, Artificial Sequence
  Description of Artificial Sequence: Synthetic oligonucleotide
agugaaccugagacugguggcuucu

SEQ ID NO: 149773 - RNA, 25 nt, Artificial Sequence
  Description of Artificial Sequence: Synthetic oligonucleotide
uagaagcagccauuaccaacuguac

SEQ ID NO: 149774 - RNA, 25 nt, Artificial Sequence
  Description of Artificial Sequence: Synthetic oligonucleotide
ccuucccuucuugcucagccaauaa

SEQ ID NO: 149775 - RNA, 25 nt, Artificial Sequence
  Description of Artificial Sequence: Synthetic oligonucleotide
aauauauccucuuucacucagaaaa

SEQ ID NO: 149776 - RNA, 1377 nt, Homo sapiens
cuccuccccucccagccucaggugccugcuucagaaaaugaaguaguaagucugcuggccuccgccaucuuaguaaaguaacagucccaugaaacaaagaugcagucgggcacucacuggagaguucugggccucugccucuuaucaguuggcguuugggggcaagaugguaaugaagaaaugggugguauuacacagacaccauauaaagucuccaucucuggaaccacaguaauauugacaugcccucaguauccuggaucugaaauacuauggcaacacaaugauaaaaacauaggcggugaugaggaugauaaaaacauaggcagugaugaggaucaccugucacugaaggaauuuucagaauuggagcaaagugguuauuaugucugcuaccccagaggaagcaaaccagaagaugcgaacuuuuaucucuaccugagggcaagagugugugagaacugcauggagauggaugugaugucgguggccacaauugucauaguggacaucugcaucacugggggcuugcugcugcugguuuacuacuggagcaagaauagaaaggccaaggccaagccugugacacgaggagcgggugcuggcggcaggcaaaggggacaaaacaaggagaggccaccaccuguucccaacccagacuaugagcccauccggaaaggccagcgggaccuguauucuggccugaaucagagacgcaucugacccucuggagaacacugccucccgcuggcccaggucuccucuccagucccccugcgacucccuguuuccugggcuagucuuggaccccacgagagagaaucguuccucagccucauggugaacucgcgcccuccagccugaucccccgcucccuccucccugccuucucugcugguacccaguccuaaaauauugcugcuuccucuuccuuugaagcaucaucaguagucacacccucacagcuggccugcccucuugccaggauauuuauuugugcuauucacucccuucccuuuggauguaacuucuccguucaguucccuccuuuucuugcauguaaguugucccccaucccaaaguauuccaucuacuuuucuaucgccguccccuuuugcagcccucucuggggauggacuggguaaauguugacagaggcccugccccguucacagauccuggcccugagccagcccugugcuccucccucccccaacacucccuaccaacccccuaauccccuacucccuccacccccccuccacuguaggccacuggauggucauuugcaucuccguaaaugugcucugcuccucagcugagagagaaaaaaauaaacuguauuuggcugcaagaaaaaaaaaaaaaaaaaaaaaa

SEQ ID NO: 149777 - RNA, 19 nt, Artificial Sequence
  Description of Artificial Sequence: Synthetic oligonucleotide
cuccuccccucccagccuc

SEQ ID NO: 149778 - RNA, 19 nt, Artificial Sequence
  Description of Artificial Sequence: Synthetic oligonucleotide
caggugccugcuucagaaa

SEQ ID NO: 149779 - RNA, 19 nt, Artificial Sequence
  Description of Artificial Sequence: Synthetic oligonucleotide
aaugaaguaguaagucugc

SEQ ID NO: 149780 - RNA, 19 nt, Artificial Sequence
  Description of Artificial Sequence: Synthetic oligonucleotide
cuggccuccgccaucuuag

SEQ ID NO: 149781 - RNA, 19 nt, Artificial Sequence
  Description of Artificial Sequence: Synthetic oligonucleotide
guaaaguaacagucccaug

SEQ ID NO: 149782 - RNA, 19 nt, Artificial Sequence
  Description of Artificial Sequence: Synthetic oligonucleotide
gaaacaaagaugcagucgg

SEQ ID NO: 149783 - RNA, 19 nt, Artificial Sequence
  Description of Artificial Sequence: Synthetic oligonucleotide
ggcacucacuggagaguuc

SEQ ID NO: 149784 - RNA, 19 nt, Artificial Sequence
  Description of Artificial Sequence: Synthetic oligonucleotide
cugggccucugccucuuau

SEQ ID NO: 149785 - RNA, 19 nt, Artificial Sequence
  Description of Artificial Sequence: Synthetic oligonucleotide
ucaguuggcguuugggggc

SEQ ID NO: 149786 - RNA, 19 nt, Artificial Sequence
  Description of Artificial Sequence: Synthetic oligonucleotide
caagaugguaaugaagaaa

SEQ ID NO: 149787 - RNA, 19 nt, Artificial Sequence
  Description of Artificial Sequence: Synthetic oligonucleotide
augggugguauuacacaga

SEQ ID NO: 149788 - RNA, 19 nt, Artificial Sequence
  Description of Artificial Sequence: Synthetic oligonucleotide
acaccauauaaagucucca

SEQ ID NO: 149789 - RNA, 19 nt, Artificial Sequence
  Description of Artificial Sequence: Synthetic oligonucleotide
aucucuggaaccacaguaa

SEQ ID NO: 149790 - RNA, 19 nt, Artificial Sequence
  Description of Artificial Sequence: Synthetic oligonucleotide
auauugacaugcccucagu

SEQ ID NO: 149791 - RNA, 19 nt, Artificial Sequence
  Description of Artificial Sequence: Synthetic oligonucleotide
uauccuggaucugaaauac

SEQ ID NO: 149792 - RNA, 19 nt, Artificial Sequence
  Description of Artificial Sequence: Synthetic oligonucleotide
cuauggcaacacaaugaua

SEQ ID NO: 149793 - RNA, 19 nt, Artificial Sequence
  Description of Artificial Sequence: Synthetic oligonucleotide
aaaaacauaggcggugaug

SEQ ID NO: 149794 - RNA, 19 nt, Artificial Sequence
  Description of Artificial Sequence: Synthetic oligonucleotide
gaggaugauaaaaacauag

SEQ ID NO: 149795 - RNA, 19 nt, Artificial Sequence
  Description of Artificial Sequence: Synthetic oligonucleotide
ggcagugaugaggaucacc

SEQ ID NO: 149796 - RNA, 19 nt, Artificial Sequence
  Description of Artificial Sequence: Synthetic oligonucleotide
cugucacugaaggaauuuu

SEQ ID NO: 149797 - RNA, 19 nt, Artificial Sequence
  Description of Artificial Sequence: Synthetic oligonucleotide
ucagaauuggagcaaagug

SEQ ID NO: 149798 - RNA, 19 nt, Artificial Sequence
  Description of Artificial Sequence: Synthetic oligonucleotide
gguuauuaugucugcuacc

SEQ ID NO: 149799 - RNA, 19 nt, Artificial Sequence
  Description of Artificial Sequence: Synthetic oligonucleotide
cccagaggaagcaaaccag

SEQ ID NO: 149800 - RNA, 19 nt, Artificial Sequence
  Description of Artificial Sequence: Synthetic oligonucleotide
gaagaugcgaacuuuuauc

SEQ ID NO: 149801 - RNA, 19 nt, Artificial Sequence
  Description of Artificial Sequence: Synthetic oligonucleotide
cucuaccugagggcaagag

SEQ ID NO: 149802 - RNA, 19 nt, Artificial Sequence
  Description of Artificial Sequence: Synthetic oligonucleotide
gugugugagaacugcaugg

SEQ ID NO: 149803 - RNA, 19 nt, Artificial Sequence
  Description of Artificial Sequence: Synthetic oligonucleotide
gagauggaugugaugucgg

SEQ ID NO: 149804 - RNA, 19 nt, Artificial Sequence
  Description of Artificial Sequence: Synthetic oligonucleotide
guggccacaauugucauag

SEQ ID NO: 149805 - RNA, 19 nt, Artificial Sequence
  Description of Artificial Sequence: Synthetic oligonucleotide
guggacaucugcaucacug

SEQ ID NO: 149806 - RNA, 19 nt, Artificial Sequence
  Description of Artificial Sequence: Synthetic oligonucleotide
gggggcuugcugcugcugg

SEQ ID NO: 149807 - RNA, 19 nt, Artificial Sequence
  Description of Artificial Sequence: Synthetic oligonucleotide
guuuacuacuggagcaaga

SEQ ID NO: 149808 - RNA, 19 nt, Artificial Sequence
  Description of Artificial Sequence: Synthetic oligonucleotide
aauagaaaggccaaggcca

SEQ ID NO: 149809 - RNA, 19 nt, Artificial Sequence
  Description of Artificial Sequence: Synthetic oligonucleotide
aagccugugacacgaggag

SEQ ID NO: 149810 - RNA, 19 nt, Artificial Sequence
  Description of Artificial Sequence: Synthetic oligonucleotide
gcgggugcuggcggcaggc

SEQ ID NO: 149811 - RNA, 19 nt, Artificial Sequence
  Description of Artificial Sequence: Synthetic oligonucleotide
caaaggggacaaaacaagg

SEQ ID NO: 149812 - RNA, 19 nt, Artificial Sequence
  Description of Artificial Sequence: Synthetic oligonucleotide
gagaggccaccaccuguuc

SEQ ID NO: 149813 - RNA, 19 nt, Artificial Sequence
  Description of Artificial Sequence: Synthetic oligonucleotide
cccaacccagacuaugagc

SEQ ID NO: 149814 - RNA, 19 nt, Artificial Sequence
  Description of Artificial Sequence: Synthetic oligonucleotide
cccauccggaaaggccagc

SEQ ID NO: 149815 - RNA, 19 nt, Artificial Sequence
  Description of Artificial Sequence: Synthetic oligonucleotide
cgggaccuguauucuggcc

SEQ ID NO: 149816 - RNA, 19 nt, Artificial Sequence
  Description of Artificial Sequence: Synthetic oligonucleotide
cugaaucagagacgcaucu

SEQ ID NO: 149817 - RNA, 19 nt, Artificial Sequence
  Description of Artificial Sequence: Synthetic oligonucleotide
ugacccucuggagaacacu

SEQ ID NO: 149818 - RNA, 19 nt, Artificial Sequence
  Description of Artificial Sequence: Synthetic oligonucleotide
ugccucccgcuggcccagg

SEQ ID NO: 149819 - RNA, 19 nt, Artificial Sequence
  Description of Artificial Sequence: Synthetic oligonucleotide
gucuccucuccaguccccc

SEQ ID NO: 149820 - RNA, 19 nt, Artificial Sequence
  Description of Artificial Sequence: Synthetic oligonucleotide
cugcgacucccuguuuccu

SEQ ID NO: 149821 - RNA, 19 nt, Artificial Sequence
  Description of Artificial Sequence: Synthetic oligonucleotide
ugggcuagucuuggacccc

SEQ ID NO: 149822 - RNA, 19 nt, Artificial Sequence
  Description of Artificial Sequence: Synthetic oligonucleotide
cacgagagagaaucguucc

SEQ ID NO: 149823 - RNA, 19 nt, Artificial Sequence
  Description of Artificial Sequence: Synthetic oligonucleotide
cucagccucauggugaacu

SEQ ID NO: 149824 - RNA, 19 nt, Artificial Sequence
  Description of Artificial Sequence: Synthetic oligonucleotide
ucgcgcccuccagccugau

SEQ ID NO: 149825 - RNA, 19 nt, Artificial Sequence
  Description of Artificial Sequence: Synthetic oligonucleotide
ucccccgcucccuccuccc

SEQ ID NO: 149826 - RNA, 19 nt, Artificial Sequence
  Description of Artificial Sequence: Synthetic oligonucleotide
cugccuucucugcugguac

SEQ ID NO: 149827 - RNA, 19 nt, Artificial Sequence
  Description of Artificial Sequence: Synthetic oligonucleotide
cccaguccuaaaauauugc

SEQ ID NO: 149828 - RNA, 19 nt, Artificial Sequence
  Description of Artificial Sequence: Synthetic oligonucleotide
cugcuuccucuuccuuuga

SEQ ID NO: 149829 - RNA, 19 nt, Artificial Sequence
  Description of Artificial Sequence: Synthetic oligonucleotide
aagcaucaucaguagucac

SEQ ID NO: 149830 - RNA, 19 nt, Artificial Sequence
  Description of Artificial Sequence: Synthetic oligonucleotide
cacccucacagcuggccug

SEQ ID NO: 149831 - RNA, 19 nt, Artificial Sequence
  Description of Artificial Sequence: Synthetic oligonucleotide
gcccucuugccaggauauu

SEQ ID NO: 149832 - RNA, 19 nt, Artificial Sequence
  Description of Artificial Sequence: Synthetic oligonucleotide
uuauuugugcuauucacuc

SEQ ID NO: 149833 - RNA, 19 nt, Artificial Sequence
  Description of Artificial Sequence: Synthetic oligonucleotide
cccuucccuuuggauguaa

SEQ ID NO: 149834 - RNA, 19 nt, Artificial Sequence
  Description of Artificial Sequence: Synthetic oligonucleotide
acuucuccguucaguuccc

SEQ ID NO: 149835 - RNA, 19 nt, Artificial Sequence
  Description of Artificial Sequence: Synthetic oligonucleotide
cuccuuuucuugcauguaa

SEQ ID NO: 149836 - RNA, 19 nt, Artificial Sequence
  Description of Artificial Sequence: Synthetic oligonucleotide
aguugucccccaucccaaa

SEQ ID NO: 149837 - RNA, 19 nt, Artificial Sequence
  Description of Artificial Sequence: Synthetic oligonucleotide
aguauuccaucuacuuuuc

SEQ ID NO: 149838 - RNA, 19 nt, Artificial Sequence
  Description of Artificial Sequence: Synthetic oligonucleotide
cuaucgccguccccuuuug

SEQ ID NO: 149839 - RNA, 19 nt, Artificial Sequence
  Description of Artificial Sequence: Synthetic oligonucleotide
gcagcccucucuggggaug

SEQ ID NO: 149840 - RNA, 19 nt, Artificial Sequence
  Description of Artificial Sequence: Synthetic oligonucleotide
ggacuggguaaauguugac

SEQ ID NO: 149841 - RNA, 19 nt, Artificial Sequence
  Description of Artificial Sequence: Synthetic oligonucleotide
cagaggcccugccccguuc

SEQ ID NO: 149842 - RNA, 19 nt, Artificial Sequence
  Description of Artificial Sequence: Synthetic oligonucleotide
cacagauccuggcccugag

SEQ ID NO: 149843 - RNA, 19 nt, Artificial Sequence
  Description of Artificial Sequence: Synthetic oligonucleotide
gccagcccugugcuccucc

SEQ ID NO: 149844 - RNA, 19 nt, Artificial Sequence
  Description of Artificial Sequence: Synthetic oligonucleotide
ccucccccaacacucccua

SEQ ID NO: 149845 - RNA, 19 nt, Artificial Sequence
  Description of Artificial Sequence: Synthetic oligonucleotide
accaacccccuaauccccu

SEQ ID NO: 149846 - RNA, 19 nt, Artificial Sequence
  Description of Artificial Sequence: Synthetic oligonucleotide
uacucccuccacccccccu

SEQ ID NO: 149847 - RNA, 19 nt, Artificial Sequence
  Description of Artificial Sequence: Synthetic oligonucleotide
uccacuguaggccacugga

SEQ ID NO: 149848 - RNA, 19 nt, Artificial Sequence
  Description of Artificial Sequence: Synthetic oligonucleotide
auggucauuugcaucuccg

SEQ ID NO: 149849 - RNA, 19 nt, Artificial Sequence
  Description of Artificial Sequence: Synthetic oligonucleotide
guaaaugugcucugcuccu

SEQ ID NO: 149850 - RNA, 19 nt, Artificial Sequence
  Description of Artificial Sequence: Synthetic oligonucleotide
ucagcugagagagaaaaaa

SEQ ID NO: 149851 - RNA, 19 nt, Artificial Sequence
  Description of Artificial Sequence: Synthetic oligonucleotide
aauaaacuguauuuggcug

SEQ ID NO: 149852 - RNA, 25 nt, Artificial Sequence
  Description of Artificial Sequence: Synthetic oligonucleotide
cuccuccccucccagccucaggugc

SEQ ID NO: 149853 - RNA, 25 nt, Artificial Sequence
  Description of Artificial Sequence: Synthetic oligonucleotide
ccugcuucagaaaaugaaguaguaa

SEQ ID NO: 149854 - RNA, 25 nt, Artificial Sequence
  Description of Artificial Sequence: Synthetic oligonucleotide
agucugcuggccuccgccaucuuag

SEQ ID NO: 149855 - RNA, 25 nt, Artificial Sequence
  Description of Artificial Sequence: Synthetic oligonucleotide
guaaaguaacagucccaugaaacaa

SEQ ID NO: 149856 - RNA, 25 nt, Artificial Sequence
  Description of Artificial Sequence: Synthetic oligonucleotide
aagaugcagucgggcacucacugga

SEQ ID NO: 149857 - RNA, 25 nt, Artificial Sequence
  Description of Artificial Sequence: Synthetic oligonucleotide
agaguucugggccucugccucuuau

SEQ ID NO: 149858 - RNA, 25 nt, Artificial Sequence
  Description of Artificial Sequence: Synthetic oligonucleotide
ucaguuggcguuugggggcaagaug

SEQ ID NO: 149859 - RNA, 25 nt, Artificial Sequence
  Description of Artificial Sequence: Synthetic oligonucleotide
gguaaugaagaaaugggugguauua

SEQ ID NO: 149860 - RNA, 25 nt, Artificial Sequence
  Description of Artificial Sequence: Synthetic oligonucleotide
acacagacaccauauaaagucucca

SEQ ID NO: 149861 - RNA, 25 nt, Artificial Sequence
  Description of Artificial Sequence: Synthetic oligonucleotide
aucucuggaaccacaguaauauuga

SEQ ID NO: 149862 - RNA, 25 nt, Artificial Sequence
  Description of Artificial Sequence: Synthetic oligonucleotide
acaugcccucaguauccuggaucug

SEQ ID NO: 149863 - RNA, 25 nt, Artificial Sequence
  Description of Artificial Sequence: Synthetic oligonucleotide
gaaauacuauggcaacacaaugaua

SEQ ID NO: 149864 - RNA, 25 nt, Artificial Sequence
  Description of Artificial Sequence: Synthetic oligonucleotide
aaaaacauaggcggugaugaggaug

SEQ ID NO: 149865 - RNA, 25 nt, Artificial Sequence
  Description of Artificial Sequence: Synthetic oligonucleotide
gauaaaaacauaggcagugaugagg

SEQ ID NO: 149866 - RNA, 25 nt, Artificial Sequence
  Description of Artificial Sequence: Synthetic oligonucleotide
gaucaccugucacugaaggaauuuu

SEQ ID NO: 149867 - RNA, 25 nt, Artificial Sequence
  Description of Artificial Sequence: Synthetic oligonucleotide
ucagaauuggagcaaagugguuauu

SEQ ID NO: 149868 - RNA, 25 nt, Artificial Sequence
  Description of Artificial Sequence: Synthetic oligonucleotide
uaugucugcuaccccagaggaagca

SEQ ID NO: 149869 - RNA, 25 nt, Artificial Sequence
  Description of Artificial Sequence: Synthetic oligonucleotide
aaaccagaagaugcgaacuuuuauc

SEQ ID NO: 149870 - RNA, 25 nt, Artificial Sequence
  Description of Artificial Sequence: Synthetic oligonucleotide
cucuaccugagggcaagagugugug

SEQ ID NO: 149871 - RNA, 25 nt, Artificial Sequence
  Description of Artificial Sequence: Synthetic oligonucleotide
gagaacugcauggagauggauguga

SEQ ID NO: 149872 - RNA, 25 nt, Artificial Sequence
  Description of Artificial Sequence: Synthetic oligonucleotide
augucgguggccacaauugucauag

SEQ ID NO: 149873 - RNA, 25 nt, Artificial Sequence
  Description of Artificial Sequence: Synthetic oligonucleotide
guggacaucugcaucacugggggcu

SEQ ID NO: 149874 - RNA, 25 nt, Artificial Sequence
  Description of Artificial Sequence: Synthetic oligonucleotide
uugcugcugcugguuuacuacugga

SEQ ID NO: 149875 - RNA, 25 nt, Artificial Sequence
  Description of Artificial Sequence: Synthetic oligonucleotide
agcaagaauagaaaggccaaggcca

SEQ ID NO: 149876 - RNA, 25 nt, Artificial Sequence
  Description of Artificial Sequence: Synthetic oligonucleotide
aagccugugacacgaggagcgggug

SEQ ID NO: 149877 - RNA, 25 nt, Artificial Sequence
  Description of Artificial Sequence: Synthetic oligonucleotide
gcuggcggcaggcaaaggggacaaa

SEQ ID NO: 149878 - RNA, 25 nt, Artificial Sequence
  Description of Artificial Sequence: Synthetic oligonucleotide
aacaaggagaggccaccaccuguuc

SEQ ID NO: 149879 - RNA, 25 nt, Artificial Sequence
  Description of Artificial Sequence: Synthetic oligonucleotide
cccaacccagacuaugagcccaucc

SEQ ID NO: 149880 - RNA, 25 nt, Artificial Sequence
  Description of Artificial Sequence: Synthetic oligonucleotide
cggaaaggccagcgggaccuguauu

SEQ ID NO: 149881 - RNA, 25 nt, Artificial Sequence
  Description of Artificial Sequence: Synthetic oligonucleotide
ucuggccugaaucagagacgcaucu

SEQ ID NO: 149882 - RNA, 25 nt, Artificial Sequence
  Description of Artificial Sequence: Synthetic oligonucleotide
ugacccucuggagaacacugccucc

SEQ ID NO: 149883 - RNA, 25 nt, Artificial Sequence
  Description of Artificial Sequence: Synthetic oligonucleotide
ccgcuggcccaggucuccucuccag

SEQ ID NO: 149884 - RNA, 25 nt, Artificial Sequence
  Description of Artificial Sequence: Synthetic oligonucleotide
gucccccugcgacucccuguuuccu

SEQ ID NO: 149885 - RNA, 25 nt, Artificial Sequence
  Description of Artificial Sequence: Synthetic oligonucleotide
ugggcuagucuuggaccccacgaga

SEQ ID NO: 149886 - RNA, 25 nt, Artificial Sequence
  Description of Artificial Sequence: Synthetic oligonucleotide
agagaaucguuccucagccucaugg

SEQ ID NO: 149887 - RNA, 25 nt, Artificial Sequence
  Description of Artificial Sequence: Synthetic oligonucleotide
gugaacucgcgcccuccagccugau

SEQ ID NO: 149888 - RNA, 25 nt, Artificial Sequence
  Description of Artificial Sequence: Synthetic oligonucleotide
ucccccgcucccuccucccugccuu

SEQ ID NO: 149889 - RNA, 25 nt, Artificial Sequence
  Description of Artificial Sequence: Synthetic oligonucleotide
ucucugcugguacccaguccuaaaa

SEQ ID NO: 149890 - RNA, 25 nt, Artificial Sequence
  Description of Artificial Sequence: Synthetic oligonucleotide
auauugcugcuuccucuuccuuuga

SEQ ID NO: 149891 - RNA, 25 nt, Artificial Sequence
  Description of Artificial Sequence: Synthetic oligonucleotide
aagcaucaucaguagucacacccuc

SEQ ID NO: 149892 - RNA, 25 nt, Artificial Sequence
  Description of Artificial Sequence: Synthetic oligonucleotide
cacagcuggccugcccucuugccag

SEQ ID NO: 149893 - RNA, 25 nt, Artificial Sequence
  Description of Artificial Sequence: Synthetic oligonucleotide
ggauauuuauuugugcuauucacuc

SEQ ID NO: 149894 - RNA, 25 nt, Artificial Sequence
  Description of Artificial Sequence: Synthetic oligonucleotide
cccuucccuuuggauguaacuucuc

SEQ ID NO: 149895 - RNA, 25 nt, Artificial Sequence
  Description of Artificial Sequence: Synthetic oligonucleotide
ccguucaguucccuccuuuucuugc

SEQ ID NO: 149896 - RNA, 25 nt, Artificial Sequence
  Description of Artificial Sequence: Synthetic oligonucleotide
cauguaaguugucccccaucccaaa

SEQ ID NO: 149897 - RNA, 25 nt, Artificial Sequence
  Description of Artificial Sequence: Synthetic oligonucleotide
aguauuccaucuacuuuucuaucgc

SEQ ID NO: 149898 - RNA, 25 nt, Artificial Sequence
  Description of Artificial Sequence: Synthetic oligonucleotide
ccguccccuuuugcagcccucucug

SEQ ID NO: 149899 - RNA, 25 nt, Artificial Sequence
  Description of Artificial Sequence: Synthetic oligonucleotide
ggggauggacuggguaaauguugac

SEQ ID NO: 149900 - RNA, 25 nt, Artificial Sequence
  Description of Artificial Sequence: Synthetic oligonucleotide
cagaggcccugccccguucacagau

SEQ ID NO: 149901 - RNA, 25 nt, Artificial Sequence
  Description of Artificial Sequence: Synthetic oligonucleotide
uccuggcccugagccagcccugugc

SEQ ID NO: 149902 - RNA, 25 nt, Artificial Sequence
  Description of Artificial Sequence: Synthetic oligonucleotide
cuccucccucccccaacacucccua

SEQ ID NO: 149903 - RNA, 25 nt, Artificial Sequence
  Description of Artificial Sequence: Synthetic oligonucleotide
accaacccccuaauccccuacuccc

SEQ ID NO: 149904 - RNA, 25 nt, Artificial Sequence
  Description of Artificial Sequence: Synthetic oligonucleotide
cuccacccccccuccacuguaggcc

SEQ ID NO: 149905 - RNA, 25 nt, Artificial Sequence
  Description of Artificial Sequence: Synthetic oligonucleotide
cacuggauggucauuugcaucuccg

SEQ ID NO: 149906 - RNA, 25 nt, Artificial Sequence
  Description of Artificial Sequence: Synthetic oligonucleotide
guaaaugugcucugcuccucagcug

SEQ ID NO: 149907 - RNA, 25 nt, Artificial Sequence
  Description of Artificial Sequence: Synthetic oligonucleotide
gagagagaaaaaaauaaacuguauu

SEQ ID NO: 149908 - RNA, 822 nt, Homo sapiens
gggcugcuccacgcuuuugccggagacagagacugacauggaacaggggaagggccuggcuguccucauccuggcuaucauucuucuucaagguacuuuggcccagucaaucaaaggaaaccacuugguuaagguguaugacuaucaagaagaugguucgguacuucugacuugugaugcagaagccaaaaauaucacaugguuuaaagaugggaagaugaucggcuuccuaacugaagauaaaaaaaaauggaaucugggaaguaaugccaaggacccucgagggauguaucaguguaaaggaucacagaacaagucaaaaccacuccaaguguauuacagaaugugucagaacugcauugaacuaaaugcagccaccauaucuggcuuucucuuugcugaaaucgucagcauuuucguccuugcuguuggggucuacuucauugcuggacaggauggaguucgccagucgagagcuucagacaagcagacucuguugcccaaugaccagcucuaccagccccucaaggaucgagaagaugaccaguacagccaccuucaaggaaaccaguugaggaggaauugaacucaggacucagaguaguccagguguucuccuccuauucaguucccagaaucaaagcaaugcauuuuggaaagcuccuagcagagagacuuucagcccuaaaucuagacucaagguucccagagaugacaaauggagaagaaaggccaucagagcaaauuuggggguuucucaaauaaaauaaaaauaaaaacaaauacuguguuucagaagcgccaccuauuggggaaaauugu

SEQ ID NO: 149909 - RNA, 19 nt, Artificial Sequence
  Description of Artificial Sequence: Synthetic oligonucleotide
gggcugcuccacgcuuuug

SEQ ID NO: 149910 - RNA, 19 nt, Artificial Sequence
  Description of Artificial Sequence: Synthetic oligonucleotide
gccggagacagagacugac

SEQ ID NO: 149911 - RNA, 19 nt, Artificial Sequence
  Description of Artificial Sequence: Synthetic oligonucleotide
cauggaacaggggaagggc

SEQ ID NO: 149912 - RNA, 19 nt, Artificial Sequence
  Description of Artificial Sequence: Synthetic oligonucleotide
ccuggcuguccucauccug

SEQ ID NO: 149913 - RNA, 19 nt, Artificial Sequence
  Description of Artificial Sequence: Synthetic oligonucleotide
ggcuaucauucuucuucaa

SEQ ID NO: 149914 - RNA, 19 nt, Artificial Sequence
  Description of Artificial Sequence: Synthetic oligonucleotide
agguacuuuggcccaguca

SEQ ID NO: 149915 - RNA, 19 nt, Artificial Sequence
  Description of Artificial Sequence: Synthetic oligonucleotide
aaucaaaggaaaccacuug

SEQ ID NO: 149916 - RNA, 19 nt, Artificial Sequence
  Description of Artificial Sequence: Synthetic oligonucleotide
gguuaagguguaugacuau

SEQ ID NO: 149917 - RNA, 19 nt, Artificial Sequence
  Description of Artificial Sequence: Synthetic oligonucleotide
ucaagaagaugguucggua

SEQ ID NO: 149918 - RNA, 19 nt, Artificial Sequence
  Description of Artificial Sequence: Synthetic oligonucleotide
acuucugacuugugaugca

SEQ ID NO: 149919 - RNA, 19 nt, Artificial Sequence
  Description of Artificial Sequence: Synthetic oligonucleotide
agaagccaaaaauaucaca

SEQ ID NO: 149920 - RNA, 19 nt, Artificial Sequence
  Description of Artificial Sequence: Synthetic oligonucleotide
augguuuaaagaugggaag

SEQ ID NO: 149921 - RNA, 19 nt, Artificial Sequence
  Description of Artificial Sequence: Synthetic oligonucleotide
gaugaucggcuuccuaacu

SEQ ID NO: 149922 - RNA, 19 nt, Artificial Sequence
  Description of Artificial Sequence: Synthetic oligonucleotide
ugaagauaaaaaaaaaugg

SEQ ID NO: 149923 - RNA, 19 nt, Artificial Sequence
  Description of Artificial Sequence: Synthetic oligonucleotide
gaaucugggaaguaaugcc

SEQ ID NO: 149924 - RNA, 19 nt, Artificial Sequence
  Description of Artificial Sequence: Synthetic oligonucleotide
caaggacccucgagggaug

SEQ ID NO: 149925 - RNA, 19 nt, Artificial Sequence
  Description of Artificial Sequence: Synthetic oligonucleotide
guaucaguguaaaggauca

SEQ ID NO: 149926 - RNA, 19 nt, Artificial Sequence
  Description of Artificial Sequence: Synthetic oligonucleotide
acagaacaagucaaaacca

SEQ ID NO: 149927 - RNA, 19 nt, Artificial Sequence
  Description of Artificial Sequence: Synthetic oligonucleotide
acuccaaguguauuacaga

SEQ ID NO: 149928 - RNA, 19 nt, Artificial Sequence
  Description of Artificial Sequence: Synthetic oligonucleotide
aaugugucagaacugcauu

SEQ ID NO: 149929 - RNA, 19 nt, Artificial Sequence
  Description of Artificial Sequence: Synthetic oligonucleotide
ugaacuaaaugcagccacc

SEQ ID NO: 149930 - RNA, 19 nt, Artificial Sequence
  Description of Artificial Sequence: Synthetic oligonucleotide
cauaucuggcuuucucuuu

SEQ ID NO: 149931 - RNA, 19 nt, Artificial Sequence
  Description of Artificial Sequence: Synthetic oligonucleotide
ugcugaaaucgucagcauu

SEQ ID NO: 149932 - RNA, 19 nt, Artificial Sequence
  Description of Artificial Sequence: Synthetic oligonucleotide
uuucguccuugcuguuggg

SEQ ID NO: 149933 - RNA, 19 nt, Artificial Sequence
  Description of Artificial Sequence: Synthetic oligonucleotide
ggucuacuucauugcugga

SEQ ID NO: 149934 - RNA, 19 nt, Artificial Sequence
  Description of Artificial Sequence: Synthetic oligonucleotide
acaggauggaguucgccag

SEQ ID NO: 149935 - RNA, 19 nt, Artificial Sequence
  Description of Artificial Sequence: Synthetic oligonucleotide
gucgagagcuucagacaag

SEQ ID NO: 149936 - RNA, 19 nt, Artificial Sequence
  Description of Artificial Sequence: Synthetic oligonucleotide
gcagacucuguugcccaau

SEQ ID NO: 149937 - RNA, 19 nt, Artificial Sequence
  Description of Artificial Sequence: Synthetic oligonucleotide
ugaccagcucuaccagccc

SEQ ID NO: 149938 - RNA, 19 nt, Artificial Sequence
  Description of Artificial Sequence: Synthetic oligonucleotide
ccucaaggaucgagaagau

SEQ ID NO: 149939 - RNA, 19 nt, Artificial Sequence
  Description of Artificial Sequence: Synthetic oligonucleotide
ugaccaguacagccaccuu

SEQ ID NO: 149940 - RNA, 19 nt, Artificial Sequence
  Description of Artificial Sequence: Synthetic oligonucleotide
ucaaggaaaccaguugagg

SEQ ID NO: 149941 - RNA, 19 nt, Artificial Sequence
  Description of Artificial Sequence: Synthetic oligonucleotide
gaggaauugaacucaggac

SEQ ID NO: 149942 - RNA, 19 nt, Artificial Sequence
  Description of Artificial Sequence: Synthetic oligonucleotide
cucagaguaguccaggugu

SEQ ID NO: 149943 - RNA, 19 nt, Artificial Sequence
  Description of Artificial Sequence: Synthetic oligonucleotide
uucuccuccuauucaguuc

SEQ ID NO: 149944 - RNA, 19 nt, Artificial Sequence
  Description of Artificial Sequence: Synthetic oligonucleotide
cccagaaucaaagcaaugc

SEQ ID NO: 149945 - RNA, 19 nt, Artificial Sequence
  Description of Artificial Sequence: Synthetic oligonucleotide
cauuuuggaaagcuccuag

SEQ ID NO: 149946 - RNA, 19 nt, Artificial Sequence
  Description of Artificial Sequence: Synthetic oligonucleotide
gcagagagacuuucagccc

SEQ ID NO: 149947 - RNA, 19 nt, Artificial Sequence
  Description of Artificial Sequence: Synthetic oligonucleotide
cuaaaucuagacucaaggu

SEQ ID NO: 149948 - RNA, 19 nt, Artificial Sequence
  Description of Artificial Sequence: Synthetic oligonucleotide
uucccagagaugacaaaug

SEQ ID NO: 149949 - RNA, 19 nt, Artificial Sequence
  Description of Artificial Sequence: Synthetic oligonucleotide
ggagaagaaaggccaucag

SEQ ID NO: 149950 - RNA, 19 nt, Artificial Sequence
  Description of Artificial Sequence: Synthetic oligonucleotide
gagcaaauuuggggguuuc

SEQ ID NO: 149951 - RNA, 19 nt, Artificial Sequence
  Description of Artificial Sequence: Synthetic oligonucleotide
cucaaauaaaauaaaaaua

SEQ ID NO: 149952 - RNA, 19 nt, Artificial Sequence
  Description of Artificial Sequence: Synthetic oligonucleotide
aaaaacaaauacuguguuu

SEQ ID NO: 149953 - RNA, 19 nt, Artificial Sequence
  Description of Artificial Sequence: Synthetic oligonucleotide
ucagaagcgccaccuauug

SEQ ID NO: 149954 - RNA, 19 nt, Artificial Sequence
  Description of Artificial Sequence: Synthetic oligonucleotide
accuauuggggaaaauugu

SEQ ID NO: 149955 - RNA, 25 nt, Artificial Sequence
  Description of Artificial Sequence: Synthetic oligonucleotide
gggcugcuccacgcuuuugccggag

SEQ ID NO: 149956 - RNA, 25 nt, Artificial Sequence
  Description of Artificial Sequence: Synthetic oligonucleotide
gacagagacugacauggaacagggg

SEQ ID NO: 149957 - RNA, 25 nt, Artificial Sequence
  Description of Artificial Sequence: Synthetic oligonucleotide
gaagggccuggcuguccucauccug

SEQ ID NO: 149958 - RNA, 25 nt, Artificial Sequence
  Description of Artificial Sequence: Synthetic oligonucleotide
ggcuaucauucuucuucaagguacu

SEQ ID NO: 149959 - RNA, 25 nt, Artificial Sequence
  Description of Artificial Sequence: Synthetic oligonucleotide
uuuggcccagucaaucaaaggaaac

SEQ ID NO: 149960 - RNA, 25 nt, Artificial Sequence
  Description of Artificial Sequence: Synthetic oligonucleotide
ccacuugguuaagguguaugacuau

SEQ ID NO: 149961 - RNA, 25 nt, Artificial Sequence
  Description of Artificial Sequence: Synthetic oligonucleotide
ucaagaagaugguucgguacuucug

SEQ ID NO: 149962 - RNA, 25 nt, Artificial Sequence
  Description of Artificial Sequence: Synthetic oligonucleotide
gacuugugaugcagaagccaaaaau

SEQ ID NO: 149963 - RNA, 25 nt, Artificial Sequence
  Description of Artificial Sequence: Synthetic oligonucleotide
uaucacaugguuuaaagaugggaag

SEQ ID NO: 149964 - RNA, 25 nt, Artificial Sequence
  Description of Artificial Sequence: Synthetic oligonucleotide
gaugaucggcuuccuaacugaagau

SEQ ID NO: 149965 - RNA, 25 nt, Artificial Sequence
  Description of Artificial Sequence: Synthetic oligonucleotide
uaaaaaaaaauggaaucugggaagu

SEQ ID NO: 149966 - RNA, 25 nt, Artificial Sequence
  Description of Artificial Sequence: Synthetic oligonucleotide
uaaugccaaggacccucgagggaug

SEQ ID NO: 149967 - RNA, 25 nt, Artificial Sequence
  Description of Artificial Sequence: Synthetic oligonucleotide
guaucaguguaaaggaucacagaac

SEQ ID NO: 149968 - RNA, 25 nt, Artificial Sequence
  Description of Artificial Sequence: Synthetic oligonucleotide
caagucaaaaccacuccaaguguau

SEQ ID NO: 149969 - RNA, 25 nt, Artificial Sequence
  Description of Artificial Sequence: Synthetic oligonucleotide
uuacagaaugugucagaacugcauu

SEQ ID NO: 149970 - RNA, 25 nt, Artificial Sequence
  Description of Artificial Sequence: Synthetic oligonucleotide
ugaacuaaaugcagccaccauaucu

SEQ ID NO: 149971 - RNA, 25 nt, Artificial Sequence
  Description of Artificial Sequence: Synthetic oligonucleotide
uggcuuucucuuugcugaaaucguc

SEQ ID NO: 149972 - RNA, 25 nt, Artificial Sequence
  Description of Artificial Sequence: Synthetic oligonucleotide
cagcauuuucguccuugcuguuggg

SEQ ID NO: 149973 - RNA, 25 nt, Artificial Sequence
  Description of Artificial Sequence: Synthetic oligonucleotide
ggucuacuucauugcuggacaggau

SEQ ID NO: 149974 - RNA, 25 nt, Artificial Sequence
  Description of Artificial Sequence: Synthetic oligonucleotide
uggaguucgccagucgagagcuuca

SEQ ID NO: 149975 - RNA, 25 nt, Artificial Sequence
  Description of Artificial Sequence: Synthetic oligonucleotide
agacaagcagacucuguugcccaau

SEQ ID NO: 149976 - RNA, 25 nt, Artificial Sequence
  Description of Artificial Sequence: Synthetic oligonucleotide
ugaccagcucuaccagccccucaag

SEQ ID NO: 149977 - RNA, 25 nt, Artificial Sequence
  Description of Artificial Sequence: Synthetic oligonucleotide
ggaucgagaagaugaccaguacagc

SEQ ID NO: 149978 - RNA, 25 nt, Artificial Sequence
  Description of Artificial Sequence: Synthetic oligonucleotide
ccaccuucaaggaaaccaguugagg

SEQ ID NO: 149979 - RNA, 25 nt, Artificial Sequence
  Description of Artificial Sequence: Synthetic oligonucleotide
gaggaauugaacucaggacucagag

SEQ ID NO: 149980 - RNA, 25 nt, Artificial Sequence
  Description of Artificial Sequence: Synthetic oligonucleotide
guaguccagguguucuccuccuauu

SEQ ID NO: 149981 - RNA, 25 nt, Artificial Sequence
  Description of Artificial Sequence: Synthetic oligonucleotide
ucaguucccagaaucaaagcaaugc

SEQ ID NO: 149982 - RNA, 25 nt, Artificial Sequence
  Description of Artificial Sequence: Synthetic oligonucleotide
cauuuuggaaagcuccuagcagaga

SEQ ID NO: 149983 - RNA, 25 nt, Artificial Sequence
  Description of Artificial Sequence: Synthetic oligonucleotide
agacuuucagcccuaaaucuagacu

SEQ ID NO: 149984 - RNA, 25 nt, Artificial Sequence
  Description of Artificial Sequence: Synthetic oligonucleotide
ucaagguucccagagaugacaaaug

SEQ ID NO: 149985 - RNA, 25 nt, Artificial Sequence
  Description of Artificial Sequence: Synthetic oligonucleotide
ggagaagaaaggccaucagagcaaa

SEQ ID NO: 149986 - RNA, 25 nt, Artificial Sequence
  Description of Artificial Sequence: Synthetic oligonucleotide
auuuggggguuucucaaauaaaaua

SEQ ID NO: 149987 - RNA, 25 nt, Artificial Sequence
  Description of Artificial Sequence: Synthetic oligonucleotide
aaaaauaaaaacaaauacuguguuu

SEQ ID NO: 149988 - RNA, 25 nt, Artificial Sequence
  Description of Artificial Sequence: Synthetic oligonucleotide
ucagaagcgccaccuauuggggaaa

SEQ ID NO: 149989 - RNA, 25 nt, Artificial Sequence
  Description of Artificial Sequence: Synthetic oligonucleotide
agcgccaccuauuggggaaaauugu

SEQ ID NO: 149990 - DNA, 21 bp, Artificial Sequence
  Description of Artificial Sequence: Synthetic oligonucleotide
  Description of Combined DNA/RNA Molecule: Synthetic oligonucleotide
cuacacaaaucagcgauuutt

SEQ ID NO: 149991 - DNA, 21 bp, Artificial Sequence
  Description of Artificial Sequence: Synthetic oligonucleotide
  Description of Combined DNA/RNA Molecule: Synthetic oligonucleotide
aaaucgcugauuuguguagtt

SEQ ID NO: 149992 - DNA, 25 bp, Artificial Sequence
  Description of Artificial Sequence: Synthetic oligonucleotide
  Description of Combined DNA/RNA Molecule: Synthetic oligonucleotide
cuacacaaaucagcgauuuccaugt

SEQ ID NO: 149993 - RNA, 27 nt, Artificial Sequence
  Description of Artificial Sequence: Synthetic oligonucleotide
acauggaaaucgcugauuuguguaguc

SEQ ID NO: 149994 - RNA, 13 nt, Artificial Sequence
  Description of Artificial Sequence: Synthetic oligonucleotide
cuacacaaaucag

SEQ ID NO: 149995 - DNA, 11 bp, Artificial Sequence
  Description of Artificial Sequence: Synthetic oligonucleotide
  Description of Combined DNA/RNA Molecule: Synthetic oligonucleotide
gauuuccaugt

SEQ ID NO: 149996 - DNA, 21 bp, Artificial Sequence
  Description of Artificial Sequence: Synthetic oligonucleotide
  Description of Combined DNA/RNA Molecule: Synthetic oligonucleotide
ggaucuuauuucuucggagtt

SEQ ID NO: 149997 - DNA, 21 bp, Artificial Sequence
  Description of Artificial Sequence: Synthetic oligonucleotide
  Description of Combined DNA/RNA Molecule: Synthetic oligonucleotide
cuccgaagaaauaagaucctt

SEQ ID NO: 149998 - RNA, 11 nt, Artificial Sequence
  Description of Artificial Sequence: Synthetic oligonucleotide
ggaucuuauuu

SEQ ID NO: 149999 - DNA, 10 bp, Artificial Sequence
  Description of Artificial Sequence: Synthetic oligonucleotide
  Description of Combined DNA/RNA Molecule: Synthetic oligonucleotide
cuucggagtt

SEQ ID NO: 150000 - RNA, 27 nt, Artificial Sequence
  Description of Artificial Sequence: Synthetic oligonucleotide
cauugucuccgaagaaauaagauccuu

SEQ ID NO: 150001 - RNA, 8 nt, Artificial Sequence
  Description of Artificial Sequence: Synthetic oligonucleotide
  modified_base (2): LNA-G
ggaucuua

SEQ ID NO: 150002 - DNA, 17 bp, Artificial Sequence
  Description of Artificial Sequence: Synthetic oligonucleotide
  Description of Combined DNA/RNA Molecule: Synthetic oligonucleotide
uuucuucggagacaatg

SEQ ID NO: 150003 - DNA, 16 bp, Artificial Sequence
  Description of Artificial Sequence: Synthetic oligonucleotide
  Description of Combined DNA/RNA Molecule: Synthetic oligonucleotide
uucuucggagacaatg

SEQ ID NO: 150004 - DNA, 15 bp, Artificial Sequence
  Description of Artificial Sequence: Synthetic oligonucleotide
  Description of Combined DNA/RNA Molecule: Synthetic oligonucleotide
ucuucggagacaatg

SEQ ID NO: 150005 - DNA, 14 bp, Artificial Sequence
  Description of Artificial Sequence: Synthetic oligonucleotide
  Description of Combined DNA/RNA Molecule: Synthetic oligonucleotide
cuucggagacaatg

SEQ ID NO: 150006 - DNA, 13 bp, Artificial Sequence
  Description of Artificial Sequence: Synthetic oligonucleotide
  Description of Combined DNA/RNA Molecule: Synthetic oligonucleotide
uucggagacaatg

SEQ ID NO: 150007 - DNA, 12 bp, Artificial Sequence
  Description of Artificial Sequence: Synthetic oligonucleotide
  Description of Combined DNA/RNA Molecule: Synthetic oligonucleotide
ucggagacaatg

SEQ ID NO: 150008 - DNA, 11 bp, Artificial Sequence
  Description of Artificial Sequence: Synthetic oligonucleotide
  Description of Combined DNA/RNA Molecule: Synthetic oligonucleotide
cggagacaatg

SEQ ID NO: 150009 - RNA, 9 nt, Artificial Sequence
  Description of Artificial Sequence: Synthetic oligonucleotide
  modified_base (2): LNA-G
ggaucuuau

SEQ ID NO: 150010 - RNA, 10 nt, Artificial Sequence
  Description of Artificial Sequence: Synthetic oligonucleotide
  modified_base (2): LNA-G
ggaucuuauu

SEQ ID NO: 150011 - RNA, 11 nt, Artificial Sequence
  Description of Artificial Sequence: Synthetic oligonucleotide
  modified_base (2): LNA-G
ggaucuuauuu

SEQ ID NO: 150012 - RNA, 12 nt, Artificial Sequence
  Description of Artificial Sequence: Synthetic oligonucleotide
  modified_base (2): LNA-G
ggaucuuauuuc

SEQ ID NO: 150013 - RNA, 8 nt, Artificial Sequence
  Description of Artificial Sequence: Synthetic oligonucleotide
  modified_base (3): LNA-A
cuacacaa

SEQ ID NO: 150014 - DNA, 13 bp, Artificial Sequence
  Description of Artificial Sequence: Synthetic oligonucleotide
  Description of Combined DNA/RNA Molecule: Synthetic oligonucleotide
  modified_base (8): LNA-A
aucagcgauuutt

SEQ ID NO: 150015 - DNA, 12 bp, Artificial Sequence
  Description of Artificial Sequence: Synthetic oligonucleotide
  Description of Combined DNA/RNA Molecule: Synthetic oligonucleotide
  modified_base (7): LNA-A
ucagcgauuutt

SEQ ID NO: 150016 - DNA, 11 bp, Artificial Sequence
  Description of Artificial Sequence: Synthetic oligonucleotide
  Description of Combined DNA/RNA Molecule: Synthetic oligonucleotide
cagcgauuutt

SEQ ID NO: 150017 - DNA, 10 bp, Artificial Sequence
  Description of Artificial Sequence: Synthetic oligonucleotide
  Description of Combined DNA/RNA Molecule: Synthetic oligonucleotide
  modified_base (5): LNA-A
agcgauuutt

SEQ ID NO: 150018 - DNA, 9 bp, Artificial Sequence
  Description of Artificial Sequence: Synthetic oligonucleotide
  Description of Combined DNA/RNA Molecule: Synthetic oligonucleotide
  modified_base (4): LNA-A
gcgauuutt

SEQ ID NO: 150019 - DNA, 8 bp, Artificial Sequence
  Description of Artificial Sequence: Synthetic oligonucleotide
  Description of Combined DNA/RNA Molecule: Synthetic oligonucleotide
  modified_base (3): LNA-A
cgauuutt

SEQ ID NO: 150020 - DNA, 7 bp, Artificial Sequence
  Description of Artificial Sequence: Synthetic oligonucleotide
  Description of Combined DNA/RNA Molecule: Synthetic oligonucleotide
  modified_base (2): LNA-A
gauuutt

SEQ ID NO: 150021 - RNA, 9 nt, Artificial Sequence
  Description of Artificial Sequence: Synthetic oligonucleotide
  modified_base (3): LNA-A
cuacacaaa

SEQ ID NO: 150022 - RNA, 10 nt, Artificial Sequence
  Description of Artificial Sequence: Synthetic oligonucleotide
  modified_base (3): LNA-A
cuacacaaau

SEQ ID NO: 150023 - RNA, 11 nt, Artificial Sequence
  Description of Artificial Sequence: Synthetic oligonucleotide
  modified_base (3): LNA-A
cuacacaaauc

SEQ ID NO: 150024 - RNA, 12 nt, Artificial Sequence
  Description of Artificial Sequence: Synthetic oligonucleotide
  modified_base (3): LNA-A
cuacacaaauca

SEQ ID NO: 150025 - RNA, 13 nt, Artificial Sequence
  Description of Artificial Sequence: Synthetic oligonucleotide
  modified_base (3): LNA-A
cuacacaaaucag

SEQ ID NO: 150026 - RNA, 14 nt, Artificial Sequence
  Description of Artificial Sequence: Synthetic oligonucleotide
  modified_base (3): LNA-A
cuacacaaaucagc

SEQ ID NO: 150027 - RNA, 13 nt, Artificial Sequence
  Description of Artificial Sequence: Synthetic oligonucleotide
  modified_base (2): LNA-G
ggaucuuauuucu

SEQ ID NO: 150028 - RNA, 14 nt, Artificial Sequence
  Description of Artificial Sequence: Synthetic oligonucleotide
  modified_base (2): LNA-G
ggaucuuauuucuu

SEQ ID NO: 150029 - RNA, 8 nt, Artificial Sequence
  Description of Artificial Sequence: Synthetic oligonucleotide
  modified_base (2): LNA-G
  modified_base (8): LNA-A
ggaucuua

SEQ ID NO: 150030 - RNA, 9 nt, Artificial Sequence
  Description of Artificial Sequence: Synthetic oligonucleotide
  modified_base (2): LNA-G
  modified_base (9): LNA-U
ggaucuuau

SEQ ID NO: 150031 - RNA, 10 nt, Artificial Sequence
  Description of Artificial Sequence: Synthetic oligonucleotide
  modified_base (2): LNA-G
  modified_base (10): LNA-U
ggaucuuauu

SEQ ID NO: 150032 - RNA, 11 nt, Artificial Sequence
  Description of Artificial Sequence: Synthetic oligonucleotide
  modified_base (2): LNA-G
  modified_base (11): LNA-U
ggaucuuauuu

SEQ ID NO: 150033 - RNA, 12 nt, Artificial Sequence
  Description of Artificial Sequence: Synthetic oligonucleotide
  modified_base (2): LNA-G
  modified_base (12): LNA-C
ggaucuuauuuc

SEQ ID NO: 150034 - RNA, 13 nt, Artificial Sequence
  Description of Artificial Sequence: Synthetic oligonucleotide
  modified_base (2): LNA-G
  modified_base (13): LNA-U
ggaucuuauuucu

SEQ ID NO: 150035 - RNA, 14 nt, Artificial Sequence
  Description of Artificial Sequence: Synthetic oligonucleotide
  modified_base (2): LNA-G
  modified_base (14): LNA-U
ggaucuuauuucuu

SEQ ID NO: 150036 - DNA, 13 bp, Artificial Sequence
  Description of Artificial Sequence: Synthetic oligonucleotide
  Description of Combined DNA/RNA Molecule: Synthetic oligonucleotide
  modified_base (8): LNA-G
uuucuucggagtt

SEQ ID NO: 150037 - DNA, 12 bp, Artificial Sequence
  Description of Artificial Sequence: Synthetic oligonucleotide
  Description of Combined DNA/RNA Molecule: Synthetic oligonucleotide
  modified_base (7): LNA-G
uucuucggagtt

SEQ ID NO: 150038 - DNA, 11 bp, Artificial Sequence
  Description of Artificial Sequence: Synthetic oligonucleotide
  Description of Combined DNA/RNA Molecule: Synthetic oligonucleotide
  modified_base (6): LNA-G
ucuucggagtt

SEQ ID NO: 150039 - DNA, 10 bp, Artificial Sequence
  Description of Artificial Sequence: Synthetic oligonucleotide
  Description of Combined DNA/RNA Molecule: Synthetic oligonucleotide
  modified_base (5): LNA-G
cuucggagtt

SEQ ID NO: 150040 - DNA, 9 bp, Artificial Sequence
  Description of Artificial Sequence: Synthetic oligonucleotide
  Description of Combined DNA/RNA Molecule: Synthetic oligonucleotide
  modified_base (4): LNA-G
uucggagtt

SEQ ID NO: 150041 - DNA, 8 bp, Artificial Sequence
  Description of Artificial Sequence: Synthetic oligonucleotide
  Description of Combined DNA/RNA Molecule: Synthetic oligonucleotide
  modified_base (3): LNA-G
ucggagtt

SEQ ID NO: 150042 - DNA, 7 bp, Artificial Sequence
  Description of Artificial Sequence: Synthetic oligonucleotide
  Description of Combined DNA/RNA Molecule: Synthetic oligonucleotide
  modified_base (2): LNA-G
cggagtt

SEQ ID NO: 150043 - DNA, 13 bp, Artificial Sequence
  Description of Artificial Sequence: Synthetic oligonucleotide
  Description of Combined DNA/RNA Molecule: Synthetic oligonucleotide
  modified_base (1): LNA-U
  modified_base (8): LNA-G
uuucuucggagtt

SEQ ID NO: 150044 - DNA, 12 bp, Artificial Sequence
  Description of Artificial Sequence: Synthetic oligonucleotide
  Description of Combined DNA/RNA Molecule: Synthetic oligonucleotide
  modified_base (1): LNA-U
  modified_base (7): LNA-G
uucuucggagtt

SEQ ID NO: 150045 - DNA, 11 bp, Artificial Sequence
  Description of Artificial Sequence: Synthetic oligonucleotide
  Description of Combined DNA/RNA Molecule: Synthetic oligonucleotide
  modified_base (1): LNA-U
  modified_base (6): LNA-G
ucuucggagtt

SEQ ID NO: 150046 - DNA, 10 bp, Artificial Sequence
  Description of Artificial Sequence: Synthetic oligonucleotide
  Description of Combined DNA/RNA Molecule: Synthetic oligonucleotide
  modified_base (1): LNA-C
  modified_base (5): LNA-G
cuucggagtt

SEQ ID NO: 150047 - DNA, 9 bp, Artificial Sequence
  Description of Artificial Sequence: Synthetic oligonucleotide
  Description of Combined DNA/RNA Molecule: Synthetic oligonucleotide
  modified_base (1): LNA-U
  modified_base (4): LNA-G
uucggagtt

SEQ ID NO: 150048 - DNA, 8 bp, Artificial Sequence
  Description of Artificial Sequence: Synthetic oligonucleotide
  Description of Combined DNA/RNA Molecule: Synthetic oligonucleotide
  modified_base (1): LNA-U
  modified_base (3): LNA-G
ucggagtt

SEQ ID NO: 150049 - DNA, 7 bp, Artificial Sequence
  Description of Artificial Sequence: Synthetic oligonucleotide
  Description of Combined DNA/RNA Molecule: Synthetic oligonucleotide
  modified_base (1): LNA-C
  modified_base (2): LNA-G
cggagtt

SEQ ID NO: 150050 - DNA, 21 bp, Artificial Sequence
  Description of Artificial Sequence: Synthetic oligonucleotide
  Description of Combined DNA/RNA Molecule: Synthetic oligonucleotide
  modified_base (2): LNA-G
  modified_base (16): LNA-G
ggaucuuauuucuucggagtt

SEQ ID NO: 150051 - DNA, 25 bp, Artificial Sequence
  Description of Artificial Sequence: Synthetic oligonucleotide
  Description of Combined DNA/RNA Molecule: Synthetic oligonucleotide
ggaucuuauuucuucggagacaatg

SEQ ID NO: 150052 - RNA, 25 nt, Artificial Sequence
  Description of Artificial Sequence: Synthetic oligonucleotide
guauuuugaugaggaguucacggcc

SEQ ID NO: 150053 - RNA, 25 nt, Artificial Sequence
  Description of Artificial Sequence: Synthetic oligonucleotide
ggcccagaugaucaccaucacacca

SEQ ID NO: 150054 - RNA, 25 nt, Artificial Sequence
  Description of Artificial Sequence: Synthetic oligonucleotide
gggaagaaaacuauccugcggguuu

SEQ ID NO: 150055 - RNA, 25 nt, Artificial Sequence
  Description of Artificial Sequence: Synthetic oligonucleotide
guuuuaauuuauuucauccaguuug

SEQ ID NO: 150056 - RNA, 25 nt, Artificial Sequence
  Description of Artificial Sequence: Synthetic oligonucleotide
acguagggaaauguuaaggacuucu

SEQ ID NO: 150057 - RNA, 25 nt, Artificial Sequence
  Description of Artificial Sequence: Synthetic oligonucleotide
ccaggguuuacccagugggacagag

SEQ ID NO: 150058 - RNA, 25 nt, Artificial Sequence
  Description of Artificial Sequence: Synthetic oligonucleotide
agcaagguuuaaauuuguuauugug

SEQ ID NO: 150059 - RNA, 25 nt, Artificial Sequence
  Description of Artificial Sequence: Synthetic oligonucleotide
uguauuauguuguucaaaugcauuu

SEQ ID NO: 150060 - RNA, 25 nt, Artificial Sequence
  Description of Artificial Sequence: Synthetic oligonucleotide
uuuuaaucuuugugacaggaaagcc

SEQ ID NO: 150061 - RNA, 25 nt, Artificial Sequence
  Description of Artificial Sequence: Synthetic oligonucleotide
uuaaucuuugugacaggaaagcccu

SEQ ID NO: 150062 - RNA, 25 nt, Artificial Sequence
  Description of Artificial Sequence: Synthetic oligonucleotide
gcugcuuaugucucccagcauggcc

SEQ ID NO: 150063 - RNA, 25 nt, Artificial Sequence
  Description of Artificial Sequence: Synthetic oligonucleotide
aaguguuucagaagcuucucccuga

SEQ ID NO: 150064 - RNA, 25 nt, Artificial Sequence
  Description of Artificial Sequence: Synthetic oligonucleotide
gaccaucaauaaggaagaagcccuu

SEQ ID NO: 150065 - RNA, 25 nt, Artificial Sequence
  Description of Artificial Sequence: Synthetic oligonucleotide
ccaucaauaaggaagaagcccuuca

SEQ ID NO: 150066 - RNA, 25 nt, Artificial Sequence
  Description of Artificial Sequence: Synthetic oligonucleotide
ucaauaaggaagaagcccuucagcg

SEQ ID NO: 150067 - RNA, 25 nt, Artificial Sequence
  Description of Artificial Sequence: Synthetic oligonucleotide
aauaaggaagaagcccuucagcggc

SEQ ID NO: 150068 - RNA, 25 nt, Artificial Sequence
  Description of Artificial Sequence: Synthetic oligonucleotide
aggaagaagcccuucagcggccagu

SEQ ID NO: 150069 - RNA, 25 nt, Artificial Sequence
  Description of Artificial Sequence: Synthetic oligonucleotide
gcauaacuaaaggugaaaagcuccg

SEQ ID NO: 150070 - RNA, 25 nt, Artificial Sequence
  Description of Artificial Sequence: Synthetic oligonucleotide
cauaacuaaaggugaaaagcuccgg

SEQ ID NO: 150071 - RNA, 25 nt, Artificial Sequence
  Description of Artificial Sequence: Synthetic oligonucleotide
cuacaucacgccagucaacagucug

SEQ ID NO: 150072 - RNA, 25 nt, Artificial Sequence
  Description of Artificial Sequence: Synthetic oligonucleotide
acuggauuuaagcagaguucaaaag

SEQ ID NO: 150073 - RNA, 25 nt, Artificial Sequence
  Description of Artificial Sequence: Synthetic oligonucleotide
cuggauuuaagcagaguucaaaagc

SEQ ID NO: 150074 - RNA, 25 nt, Artificial Sequence
  Description of Artificial Sequence: Synthetic oligonucleotide
gauuuaagcagaguucaaaagcccu

SEQ ID NO: 150075 - RNA, 25 nt, Artificial Sequence
  Description of Artificial Sequence: Synthetic oligonucleotide
auuuaagcagaguucaaaagcccuu

SEQ ID NO: 150076 - RNA, 25 nt, Artificial Sequence
  Description of Artificial Sequence: Synthetic oligonucleotide
uuaagcagaguucaaaagcccuuca

SEQ ID NO: 150077 - RNA, 25 nt, Artificial Sequence
  Description of Artificial Sequence: Synthetic oligonucleotide
uaagcagaguucaaaagcccuucag

SEQ ID NO: 150078 - RNA, 25 nt, Artificial Sequence
  Description of Artificial Sequence: Synthetic oligonucleotide
agcagaguucaaaagcccuucagcg

SEQ ID NO: 150079 - RNA, 25 nt, Artificial Sequence
  Description of Artificial Sequence: Synthetic oligonucleotide
cucagggucugagugaagccgcucg

SEQ ID NO: 150080 - RNA, 25 nt, Artificial Sequence
  Description of Artificial Sequence: Synthetic oligonucleotide
caagcaacuacaucacgccagucaa

SEQ ID NO: 150081 - RNA, 25 nt, Artificial Sequence
  Description of Artificial Sequence: Synthetic oligonucleotide
aucaauggcagcuucuuggugcgug

SEQ ID NO: 150082 - RNA, 25 nt, Artificial Sequence
  Description of Artificial Sequence: Synthetic oligonucleotide
uuccagcccacauuggauucaucag

SEQ ID NO: 150083 - RNA, 25 nt, Artificial Sequence
  Description of Artificial Sequence: Synthetic oligonucleotide
cagcugagaauguggaauaccuaag

SEQ ID NO: 150084 - RNA, 25 nt, Artificial Sequence
  Description of Artificial Sequence: Synthetic oligonucleotide
aacguaucuccuaauuugaggcuca

SEQ ID NO: 150085 - RNA, 25 nt, Artificial Sequence
  Description of Artificial Sequence: Synthetic oligonucleotide
ccuaaaauaauuucucuacaauugg

SEQ ID NO: 150086 - RNA, 25 nt, Artificial Sequence
  Description of Artificial Sequence: Synthetic oligonucleotide
uggaagauucagcuaguuaggagcc

SEQ ID NO: 150087 - RNA, 25 nt, Artificial Sequence
  Description of Artificial Sequence: Synthetic oligonucleotide
uuaaacucuccuagucaauauccac

SEQ ID NO: 150088 - RNA, 25 nt, Artificial Sequence
  Description of Artificial Sequence: Synthetic oligonucleotide
cagccuacaguuauguucagucaca

SEQ ID NO: 150089 - RNA, 25 nt, Artificial Sequence
  Description of Artificial Sequence: Synthetic oligonucleotide
guuauguucagucacacacacauac

SEQ ID NO: 150090 - RNA, 25 nt, Artificial Sequence
  Description of Artificial Sequence: Synthetic oligonucleotide
cacauacaaaauguuccuuuugcuu

SEQ ID NO: 150091 - RNA, 25 nt, Artificial Sequence
  Description of Artificial Sequence: Synthetic oligonucleotide
uccuuuugcuuuuaaaguaauuuuu

SEQ ID NO: 150092 - RNA, 25 nt, Artificial Sequence
  Description of Artificial Sequence: Synthetic oligonucleotide
ugaccugugaagcaacagucaaugg

SEQ ID NO: 150093 - RNA, 25 nt, Artificial Sequence
  Description of Artificial Sequence: Synthetic oligonucleotide
cuaucucacacaucgacaaaccaau

SEQ ID NO: 150094 - RNA, 25 nt, Artificial Sequence
  Description of Artificial Sequence: Synthetic oligonucleotide
uguccucaauuguacugcuaccacu

SEQ ID NO: 150095 - RNA, 25 nt, Artificial Sequence
  Description of Artificial Sequence: Synthetic oligonucleotide
aaaccguagcuggcaagcggucuua

SEQ ID NO: 150096 - RNA, 25 nt, Artificial Sequence
  Description of Artificial Sequence: Synthetic oligonucleotide
uagcuggcaagcggucuuaccggcu

SEQ ID NO: 150097 - RNA, 25 nt, Artificial Sequence
  Description of Artificial Sequence: Synthetic oligonucleotide
uuguaugguuaaaagauggguuacc

SEQ ID NO: 150098 - RNA, 25 nt, Artificial Sequence
  Description of Artificial Sequence: Synthetic oligonucleotide
ugguuaaaagauggguuaccugcga

SEQ ID NO: 150099 - RNA, 25 nt, Artificial Sequence
  Description of Artificial Sequence: Synthetic oligonucleotide
cagggaauuauacaaucuugcugag

SEQ ID NO: 150100 - RNA, 25 nt, Artificial Sequence
  Description of Artificial Sequence: Synthetic oligonucleotide
acaaucuugcugagcauaaaacagu

SEQ ID NO: 150101 - RNA, 25 nt, Artificial Sequence
  Description of Artificial Sequence: Synthetic oligonucleotide
ccaauaaugaagaguccuuuauccu

SEQ ID NO: 150102 - RNA, 25 nt, Artificial Sequence
  Description of Artificial Sequence: Synthetic oligonucleotide
acuuuggauguuccaacgcaaguug

SEQ ID NO: 150103 - RNA, 25 nt, Artificial Sequence
  Description of Artificial Sequence: Synthetic oligonucleotide
aaugcuuccacuaaacugaaaccau

SEQ ID NO: 150104 - RNA, 25 nt, Artificial Sequence
  Description of Artificial Sequence: Synthetic oligonucleotide
gagaaaguuugacuuuguuaaauau

SEQ ID NO: 150105 - RNA, 25 nt, Artificial Sequence
  Description of Artificial Sequence: Synthetic oligonucleotide
aaagaacuacuguauauuaaaaguu

SEQ ID NO: 150106 - RNA, 25 nt, Artificial Sequence
  Description of Artificial Sequence: Synthetic oligonucleotide
uuagaaauacggguuuugacuuaac

SEQ ID NO: 150107 - RNA, 25 nt, Artificial Sequence
  Description of Artificial Sequence: Synthetic oligonucleotide
aacauggguacagcaaacucagcac

SEQ ID NO: 150108 - RNA, 25 nt, Artificial Sequence
  Description of Artificial Sequence: Synthetic oligonucleotide
aaagacacagaagaugcugaccuca

SEQ ID NO: 150109 - RNA, 25 nt, Artificial Sequence
  Description of Artificial Sequence: Synthetic oligonucleotide
uaguagggagguuuauucagaucgc

SEQ ID NO: 150110 - RNA, 25 nt, Artificial Sequence
  Description of Artificial Sequence: Synthetic oligonucleotide
gccuucugcagcaggguucugggau

SEQ ID NO: 150111 - RNA, 25 nt, Artificial Sequence
  Description of Artificial Sequence: Synthetic oligonucleotide
ggucugguacauauuggaaauuaug

SEQ ID NO: 150112 - RNA, 25 nt, Artificial Sequence
  Description of Artificial Sequence: Synthetic oligonucleotide
cuaguccuuccgauggaagcacuag

SEQ ID NO: 150113 - RNA, 25 nt, Artificial Sequence
  Description of Artificial Sequence: Synthetic oligonucleotide
ccagugaauauuguuuuuaugugga

SEQ ID NO: 150114 - RNA, 25 nt, Artificial Sequence
  Description of Artificial Sequence: Synthetic oligonucleotide
augaauucaaguuggaauugguaga

SEQ ID NO: 150115 - RNA, 25 nt, Artificial Sequence
  Description of Artificial Sequence: Synthetic oligonucleotide
caggacacagauuuagacuuggaga

SEQ ID NO: 150116 - RNA, 25 nt, Artificial Sequence
  Description of Artificial Sequence: Synthetic oligonucleotide
cucaaagcacaguuacaguauucca

SEQ ID NO: 150117 - RNA, 25 nt, Artificial Sequence
  Description of Artificial Sequence: Synthetic oligonucleotide
accacugccaccacugaugaauuaa

SEQ ID NO: 150118 - RNA, 25 nt, Artificial Sequence
  Description of Artificial Sequence: Synthetic oligonucleotide
gaaacuacuagugccacaucaucac

SEQ ID NO: 150119 - RNA, 25 nt, Artificial Sequence
  Description of Artificial Sequence: Synthetic oligonucleotide
aagucggacagccucaccaaacaga

SEQ ID NO: 150120 - RNA, 25 nt, Artificial Sequence
  Description of Artificial Sequence: Synthetic oligonucleotide
gaaagcgaaaaauggaacaugaugg

SEQ ID NO: 150121 - RNA, 25 nt, Artificial Sequence
  Description of Artificial Sequence: Synthetic oligonucleotide
cccucugauuuagcauguagacugc

SEQ ID NO: 150122 - RNA, 25 nt, Artificial Sequence
  Description of Artificial Sequence: Synthetic oligonucleotide
ugagcuauuuaaggaucuauuuaug

SEQ ID NO: 150123 - RNA, 25 nt, Artificial Sequence
  Description of Artificial Sequence: Synthetic oligonucleotide
aaaaggugaaaaagcacuauuauca

SEQ ID NO: 150124 - RNA, 25 nt, Artificial Sequence
  Description of Artificial Sequence: Synthetic oligonucleotide
gaaaaagcacuauuaucaguucugc

SEQ ID NO: 150125 - RNA, 25 nt, Artificial Sequence
  Description of Artificial Sequence: Synthetic oligonucleotide
ggcugaaaagaaagauuaaaccuac

SEQ ID NO: 150126 - RNA, 25 nt, Artificial Sequence
  Description of Artificial Sequence: Synthetic oligonucleotide
uaaacccuuauaauaaaauccuucu

SEQ ID NO: 150127 - RNA, 25 nt, Artificial Sequence
  Description of Artificial Sequence: Synthetic oligonucleotide
cauacuauuagccaaugcuguagac

SEQ ID NO: 150128 - RNA, 25 nt, Artificial Sequence
  Description of Artificial Sequence: Synthetic oligonucleotide
gacagaagcauuuugauaggaauag

SEQ ID NO: 150129 - RNA, 25 nt, Artificial Sequence
  Description of Artificial Sequence: Synthetic oligonucleotide
agagcaaauaagauaauggcccuga

SEQ ID NO: 150130 - RNA, 25 nt, Artificial Sequence
  Description of Artificial Sequence: Synthetic oligonucleotide
ccaacauuuuucucuuccucaagca

SEQ ID NO: 150131 - RNA, 25 nt, Artificial Sequence
  Description of Artificial Sequence: Synthetic oligonucleotide
uuaaguaugagaaaaguucagccca

SEQ ID NO: 150132 - RNA, 25 nt, Artificial Sequence
  Description of Artificial Sequence: Synthetic oligonucleotide
caggaauaaagauggcugcugaacc

SEQ ID NO: 150133 - RNA, 25 nt, Artificial Sequence
  Description of Artificial Sequence: Synthetic oligonucleotide
aauuugaaugaccaaguucucuuca

SEQ ID NO: 150134 - RNA, 25 nt, Artificial Sequence
  Description of Artificial Sequence: Synthetic oligonucleotide
auguauaaagauagccagccuagag

SEQ ID NO: 150135 - RNA, 25 nt, Artificial Sequence
  Description of Artificial Sequence: Synthetic oligonucleotide
ggcuguaacuaucucugugaagugu

SEQ ID NO: 150136 - RNA, 25 nt, Artificial Sequence
  Description of Artificial Sequence: Synthetic oligonucleotide
ucugugaagugugagaaaauuucaa

SEQ ID NO: 150137 - RNA, 25 nt, Artificial Sequence
  Description of Artificial Sequence: Synthetic oligonucleotide
ccuuuaaggaaaugaauccuccuga

SEQ ID NO: 150138 - RNA, 25 nt, Artificial Sequence
  Description of Artificial Sequence: Synthetic oligonucleotide
aaggauacaaaaagugacaucauau

SEQ ID NO: 150139 - RNA, 25 nt, Artificial Sequence
  Description of Artificial Sequence: Synthetic oligonucleotide
agaugcaauuugaaucuucaucaua

SEQ ID NO: 150140 - RNA, 25 nt, Artificial Sequence
  Description of Artificial Sequence: Synthetic oligonucleotide
guucaaaacgaagacuagcuauuaa

SEQ ID NO: 150141 - RNA, 25 nt, Artificial Sequence
  Description of Artificial Sequence: Synthetic oligonucleotide
gugaaaccucaucucuacuaaaaau

SEQ ID NO: 150142 - RNA, 25 nt, Artificial Sequence
  Description of Artificial Sequence: Synthetic oligonucleotide
acgaaagagaagcucuaucucgccu

SEQ ID NO: 150143 - RNA, 25 nt, Artificial Sequence
  Description of Artificial Sequence: Synthetic oligonucleotide
cuccacaagcgccuucgguccaguu

SEQ ID NO: 150144 - RNA, 25 nt, Artificial Sequence
  Description of Artificial Sequence: Synthetic oligonucleotide
gagaagauuccaaagauguagccgc

SEQ ID NO: 150145 - RNA, 25 nt, Artificial Sequence
  Description of Artificial Sequence: Synthetic oligonucleotide
aaucuggauucaaugaggagacuug

SEQ ID NO: 150146 - RNA, 25 nt, Artificial Sequence
  Description of Artificial Sequence: Synthetic oligonucleotide
agaacagauuugagaguagugagga

SEQ ID NO: 150147 - RNA, 25 nt, Artificial Sequence
  Description of Artificial Sequence: Synthetic oligonucleotide
ccagagcugugcagaugaguacaaa

SEQ ID NO: 150148 - RNA, 25 nt, Artificial Sequence
  Description of Artificial Sequence: Synthetic oligonucleotide
ccucagauuguuguuguuaaugggc

SEQ ID NO: 150149 - RNA, 25 nt, Artificial Sequence
  Description of Artificial Sequence: Synthetic oligonucleotide
cuauuuuaauuauuuuuaauuuauu

SEQ ID NO: 150150 - RNA, 25 nt, Artificial Sequence
  Description of Artificial Sequence: Synthetic oligonucleotide
uuuaauuuauuaauauuuaaauaug

SEQ ID NO: 150151 - RNA, 25 nt, Artificial Sequence
  Description of Artificial Sequence: Synthetic oligonucleotide
augcaguuugaauauccuuuguuuc

SEQ ID NO: 150152 - RNA, 25 nt, Artificial Sequence
  Description of Artificial Sequence: Synthetic oligonucleotide
caugcugcuggcgucuaaguguuug

SEQ ID NO: 150153 - RNA, 25 nt, Artificial Sequence
  Description of Artificial Sequence: Synthetic oligonucleotide
agaugugcauuucaccugugacaaa

SEQ ID NO: 150154 - RNA, 25 nt, Artificial Sequence
  Description of Artificial Sequence: Synthetic oligonucleotide
ucaaaaccugugccaggcugaauua

SEQ ID NO: 150155 - RNA, 25 nt, Artificial Sequence
  Description of Artificial Sequence: Synthetic oligonucleotide
gaauguggguagucauucuuacaau

SEQ ID NO: 150156 - RNA, 25 nt, Artificial Sequence
  Description of Artificial Sequence: Synthetic oligonucleotide
auguggguagucauucuuacaauug

SEQ ID NO: 150157 - RNA, 25 nt, Artificial Sequence
  Description of Artificial Sequence: Synthetic oligonucleotide
ugaaaaugagcaucagagaguguac

SEQ ID NO: 150158 - RNA, 25 nt, Artificial Sequence
  Description of Artificial Sequence: Synthetic oligonucleotide
uugcuuuucauguagaacucagcag

SEQ ID NO: 150159 - RNA, 25 nt, Artificial Sequence
  Description of Artificial Sequence: Synthetic oligonucleotide
uguauuucuauauuuauuuucagua

SEQ ID NO: 150160 - RNA, 25 nt, Artificial Sequence
  Description of Artificial Sequence: Synthetic oligonucleotide
uuugauuaauguuucuuaaauggaa

SEQ ID NO: 150161 - RNA, 25 nt, Artificial Sequence
  Description of Artificial Sequence: Synthetic oligonucleotide
caacguguauagugccuaaaauugu

SEQ ID NO: 150162 - RNA, 25 nt, Artificial Sequence
  Description of Artificial Sequence: Synthetic oligonucleotide
cauauccuuggcuacuaacaucugg

SEQ ID NO: 150163 - RNA, 25 nt, Artificial Sequence
  Description of Artificial Sequence: Synthetic oligonucleotide
uacuaacaucuggagacugugagcu

SEQ ID NO: 150164 - RNA, 25 nt, Artificial Sequence
  Description of Artificial Sequence: Synthetic oligonucleotide
cauaaguugugugcuuuuuauuaau

SEQ ID NO: 150165 - RNA, 25 nt, Artificial Sequence
  Description of Artificial Sequence: Synthetic oligonucleotide
gcaucauuuuggcucuucuuacauu

SEQ ID NO: 150166 - RNA, 25 nt, Artificial Sequence
  Description of Artificial Sequence: Synthetic oligonucleotide
gcucuucuuacauuuguaaaaaugu

SEQ ID NO: 150167 - RNA, 25 nt, Artificial Sequence
  Description of Artificial Sequence: Synthetic oligonucleotide
agauuaggucaucuuaauucauauu

SEQ ID NO: 150168 - RNA, 25 nt, Artificial Sequence
  Description of Artificial Sequence: Synthetic oligonucleotide
auggaauugaaagaacuaaucauga

SEQ ID NO: 150169 - RNA, 25 nt, Artificial Sequence
  Description of Artificial Sequence: Synthetic oligonucleotide
cacacucauuccuucugcucuuggg

SEQ ID NO: 150170 - RNA, 25 nt, Artificial Sequence
  Description of Artificial Sequence: Synthetic oligonucleotide
uguagagguaaccaguagcuuugag

SEQ ID NO: 150171 - RNA, 25 nt, Artificial Sequence
  Description of Artificial Sequence: Synthetic oligonucleotide
caaccacaugccacguaauauuuca

SEQ ID NO: 150172 - RNA, 25 nt, Artificial Sequence
  Description of Artificial Sequence: Synthetic oligonucleotide
ucggaaacaaguuauucucuucacu

SEQ ID NO: 150173 - RNA, 25 nt, Artificial Sequence
  Description of Artificial Sequence: Synthetic oligonucleotide
acucccaauaacuaaugcuaagaaa

SEQ ID NO: 150174 - RNA, 25 nt, Artificial Sequence
  Description of Artificial Sequence: Synthetic oligonucleotide
aaugcuaagaaaugcugaaaaucaa

SEQ ID NO: 150175 - RNA, 25 nt, Artificial Sequence
  Description of Artificial Sequence: Synthetic oligonucleotide
gucuuucucuaaauaugauuacuuu

SEQ ID NO: 150176 - RNA, 25 nt, Artificial Sequence
  Description of Artificial Sequence: Synthetic oligonucleotide
ugaauuucaggcauuuuguucuaca

SEQ ID NO: 150177 - RNA, 25 nt, Artificial Sequence
  Description of Artificial Sequence: Synthetic oligonucleotide
cgauucccucucacccgggacucuc

SEQ ID NO: 150178 - RNA, 25 nt, Artificial Sequence
  Description of Artificial Sequence: Synthetic oligonucleotide
aggaaagugaaccuuuaaaguaaag

SEQ ID NO: 150179 - RNA, 25 nt, Artificial Sequence
  Description of Artificial Sequence: Synthetic oligonucleotide
gaggcugcaugcucuggaagccugg

SEQ ID NO: 150180 - RNA, 25 nt, Artificial Sequence
  Description of Artificial Sequence: Synthetic oligonucleotide
ucucugaacagaaaacaaaagagag

SEQ ID NO: 150181 - RNA, 25 nt, Artificial Sequence
  Description of Artificial Sequence: Synthetic oligonucleotide
aacuuggcuguaaucaguuaugccg

SEQ ID NO: 150182 - RNA, 25 nt, Artificial Sequence
  Description of Artificial Sequence: Synthetic oligonucleotide
agaagccaaaauuaaaagaagucca

SEQ ID NO: 150183 - RNA, 25 nt, Artificial Sequence
  Description of Artificial Sequence: Synthetic oligonucleotide
auuaaaagaaguccaggugagguua

SEQ ID NO: 150184 - RNA, 25 nt, Artificial Sequence
  Description of Artificial Sequence: Synthetic oligonucleotide
gaauccggauuaucgggaagaggac

SEQ ID NO: 150185 - RNA, 25 nt, Artificial Sequence
  Description of Artificial Sequence: Synthetic oligonucleotide
aaugugacaucaaagcaaguauugu

SEQ ID NO: 150186 - RNA, 25 nt, Artificial Sequence
  Description of Artificial Sequence: Synthetic oligonucleotide
caucaaagcaaguauuguagcacuc

SEQ ID NO: 150187 - RNA, 25 nt, Artificial Sequence
  Description of Artificial Sequence: Synthetic oligonucleotide
agagagagaaaacaaaaccacaaau

SEQ ID NO: 150188 - RNA, 25 nt, Artificial Sequence
  Description of Artificial Sequence: Synthetic oligonucleotide
ucgcuguaguauuuaagcccauaca

SEQ ID NO: 150189 - RNA, 25 nt, Artificial Sequence
  Description of Artificial Sequence: Synthetic oligonucleotide
cgcuguaguauuuaagcccauacag

SEQ ID NO: 150190 - RNA, 25 nt, Artificial Sequence
  Description of Artificial Sequence: Synthetic oligonucleotide
auuuaagcccauacagaaaccuucc

SEQ ID NO: 150191 - RNA, 25 nt, Artificial Sequence
  Description of Artificial Sequence: Synthetic oligonucleotide
auuaaaauaaacaugguauaccuac

SEQ ID NO: 150192 - RNA, 25 nt, Artificial Sequence
  Description of Artificial Sequence: Synthetic oligonucleotide
cuguucugaucggccaguuuucgga

SEQ ID NO: 150193 - RNA, 25 nt, Artificial Sequence
  Description of Artificial Sequence: Synthetic oligonucleotide
aaauaauuugaacuuuggaacaggg

SEQ ID NO: 150194 - RNA, 25 nt, Artificial Sequence
  Description of Artificial Sequence: Synthetic oligonucleotide
ugcgaccuuaauuuaacuuuccagu

SEQ ID NO: 150195 - RNA, 25 nt, Artificial Sequence
  Description of Artificial Sequence: Synthetic oligonucleotide
cugagaaagcuaaaguuugguuuug

SEQ ID NO: 150196 - RNA, 25 nt, Artificial Sequence
  Description of Artificial Sequence: Synthetic oligonucleotide
aguaaagaugcuacuucccacugua

SEQ ID NO: 150197 - RNA, 25 nt, Artificial Sequence
  Description of Artificial Sequence: Synthetic oligonucleotide
cugcuuaauugcugauaccauauga

SEQ ID NO: 150198 - RNA, 25 nt, Artificial Sequence
  Description of Artificial Sequence: Synthetic oligonucleotide
uaccauaugaaugaaacaugggcug

SEQ ID NO: 150199 - RNA, 25 nt, Artificial Sequence
  Description of Artificial Sequence: Synthetic oligonucleotide
aacuuucuuauccaacuuuuucaua

SEQ ID NO: 150200 - RNA, 25 nt, Artificial Sequence
  Description of Artificial Sequence: Synthetic oligonucleotide
ccuugcaugacaucaugaggccgga

SEQ ID NO: 150201 - RNA, 25 nt, Artificial Sequence
  Description of Artificial Sequence: Synthetic oligonucleotide
ugaauuuguauaugacugcauuugu

SEQ ID NO: 150202 - RNA, 25 nt, Artificial Sequence
  Description of Artificial Sequence: Synthetic oligonucleotide
gaauccuaguagaauguuuacuacc

SEQ ID NO: 150203 - RNA, 25 nt, Artificial Sequence
  Description of Artificial Sequence: Synthetic oligonucleotide
gaaagggaagaauuuuuugaugaaa

SEQ ID NO: 150204 - RNA, 25 nt, Artificial Sequence
  Description of Artificial Sequence: Synthetic oligonucleotide
uaucggcaugccagugugugaauuu

SEQ ID NO: 150205 - RNA, 25 nt, Artificial Sequence
  Description of Artificial Sequence: Synthetic oligonucleotide
caccucauaguagagcaauguaugu

SEQ ID NO: 150206 - RNA, 25 nt, Artificial Sequence
  Description of Artificial Sequence: Synthetic oligonucleotide
ccagaauugccaaagcacauauaua

SEQ ID NO: 150207 - RNA, 25 nt, Artificial Sequence
  Description of Artificial Sequence: Synthetic oligonucleotide
uggugaucuggguaauaguuucucc

SEQ ID NO: 150208 - RNA, 25 nt, Artificial Sequence
  Description of Artificial Sequence: Synthetic oligonucleotide
gaucuggguaauaguuucuccaaau

SEQ ID NO: 150209 - RNA, 25 nt, Artificial Sequence
  Description of Artificial Sequence: Synthetic oligonucleotide
ggaugugaugaauacuuccuagaaa

SEQ ID NO: 150210 - RNA, 25 nt, Artificial Sequence
  Description of Artificial Sequence: Synthetic oligonucleotide
cauuuccacagcuacaccauauaug

SEQ ID NO: 150211 - RNA, 25 nt, Artificial Sequence
  Description of Artificial Sequence: Synthetic oligonucleotide
acagcuacaccauauaugaauggag

SEQ ID NO: 150212 - RNA, 25 nt, Artificial Sequence
  Description of Artificial Sequence: Synthetic oligonucleotide
ugcaguucuuacacgagaagaagau

SEQ ID NO: 150213 - RNA, 25 nt, Artificial Sequence
  Description of Artificial Sequence: Synthetic oligonucleotide
acgagaagaagaucauuuacaggga

SEQ ID NO: 150214 - RNA, 25 nt, Artificial Sequence
  Description of Artificial Sequence: Synthetic oligonucleotide
cgagaagaagaucauuuacagggac

SEQ ID NO: 150215 - RNA, 25 nt, Artificial Sequence
  Description of Artificial Sequence: Synthetic oligonucleotide
aagaagaucauuuacagggaccuga

SEQ ID NO: 150216 - RNA, 25 nt, Artificial Sequence
  Description of Artificial Sequence: Synthetic oligonucleotide
agaggaagagguguuugacugcauc

SEQ ID NO: 150217 - RNA, 25 nt, Artificial Sequence
  Description of Artificial Sequence: Synthetic oligonucleotide
gaggaagagguguuugacugcaucg

SEQ ID NO: 150218 - RNA, 25 nt, Artificial Sequence
  Description of Artificial Sequence: Synthetic oligonucleotide
cuacuuugagggcgaguucacaggg

SEQ ID NO: 150219 - RNA, 25 nt, Artificial Sequence
  Description of Artificial Sequence: Synthetic oligonucleotide
agggcaucuccuggcaccucugucc

SEQ ID NO: 150220 - RNA, 25 nt, Artificial Sequence
  Description of Artificial Sequence: Synthetic oligonucleotide
ggagugauaugguuugucuuuuuaa

SEQ ID NO: 150221 - RNA, 25 nt, Artificial Sequence
  Description of Artificial Sequence: Synthetic oligonucleotide
gagugauaugguuugucuuuuuaag

SEQ ID NO: 150222 - RNA, 25 nt, Artificial Sequence
  Description of Artificial Sequence: Synthetic oligonucleotide
ugcaguaaagauccuaaagguuguc

SEQ ID NO: 150223 - RNA, 25 nt, Artificial Sequence
  Description of Artificial Sequence: Synthetic oligonucleotide
aguaaagauccuaaagguugucgac

SEQ ID NO: 150224 - RNA, 25 nt, Artificial Sequence
  Description of Artificial Sequence: Synthetic oligonucleotide
ugacaaaggacaaccuggcaauugu

SEQ ID NO: 150225 - RNA, 25 nt, Artificial Sequence
  Description of Artificial Sequence: Synthetic oligonucleotide
gcaauugugacccaguggugcgagg

SEQ ID NO: 150226 - RNA, 25 nt, Artificial Sequence
  Description of Artificial Sequence: Synthetic oligonucleotide
aacaucauccauagagacaugaaau

SEQ ID NO: 150227 - RNA, 25 nt, Artificial Sequence
  Description of Artificial Sequence: Synthetic oligonucleotide
ugaaauccaacaauauauuucucca

SEQ ID NO: 150228 - RNA, 25 nt, Artificial Sequence
  Description of Artificial Sequence: Synthetic oligonucleotide
aacaauauauuucuccaugaaggcu

SEQ ID NO: 150229 - RNA, 25 nt, Artificial Sequence
  Description of Artificial Sequence: Synthetic oligonucleotide
aacaguaaagucacgcuggaguggu

SEQ ID NO: 150230 - RNA, 25 nt, Artificial Sequence
  Description of Artificial Sequence: Synthetic oligonucleotide
ugugaagaaaguaaaggaagagagg

SEQ ID NO: 150231 - RNA, 25 nt, Artificial Sequence
  Description of Artificial Sequence: Synthetic oligonucleotide
cuuccgagccauccuugcaucgggc

SEQ ID NO: 150232 - RNA, 25 nt, Artificial Sequence
  Description of Artificial Sequence: Synthetic oligonucleotide
aauggagguugaauauccuacugug

SEQ ID NO: 150233 - RNA, 25 nt, Artificial Sequence
  Description of Artificial Sequence: Synthetic oligonucleotide
ggagguugaauauccuacuguguaa

SEQ ID NO: 150234 - RNA, 25 nt, Artificial Sequence
  Description of Artificial Sequence: Synthetic oligonucleotide
auuuugaguuuucccuuguagugua

SEQ ID NO: 150235 - RNA, 25 nt, Artificial Sequence
  Description of Artificial Sequence: Synthetic oligonucleotide
uauccuguuuguucuuuguugauug

SEQ ID NO: 150236 - RNA, 25 nt, Artificial Sequence
  Description of Artificial Sequence: Synthetic oligonucleotide
ccuguuuguucuuuguugauugaaa

SEQ ID NO: 150237 - RNA, 25 nt, Artificial Sequence
  Description of Artificial Sequence: Synthetic oligonucleotide
cucuacagccuucuuuuucuuccau

SEQ ID NO: 150238 - RNA, 25 nt, Artificial Sequence
  Description of Artificial Sequence: Synthetic oligonucleotide
ucuuccauagcuaaucuuccuucua

SEQ ID NO: 150239 - RNA, 25 nt, Artificial Sequence
  Description of Artificial Sequence: Synthetic oligonucleotide
auaaucuuccuguugaaugcuucau

SEQ ID NO: 150240 - RNA, 25 nt, Artificial Sequence
  Description of Artificial Sequence: Synthetic oligonucleotide
uaaucuuccuguugaaugcuucaug

SEQ ID NO: 150241 - RNA, 25 nt, Artificial Sequence
  Description of Artificial Sequence: Synthetic oligonucleotide
cuucaugacuugaauucuacuuuga

SEQ ID NO: 150242 - RNA, 25 nt, Artificial Sequence
  Description of Artificial Sequence: Synthetic oligonucleotide
aagagggagagaagcaacuacagac

SEQ ID NO: 150243 - RNA, 25 nt, Artificial Sequence
  Description of Artificial Sequence: Synthetic oligonucleotide
cgucuccuaccagaccaaggucaac

SEQ ID NO: 150244 - RNA, 25 nt, Artificial Sequence
  Description of Artificial Sequence: Synthetic oligonucleotide
gaucaaucggcccgacuaucucgac

SEQ ID NO: 150245 - RNA, 25 nt, Artificial Sequence
  Description of Artificial Sequence: Synthetic oligonucleotide
ggacgaacauccaaccuucccaaac

SEQ ID NO: 150246 - RNA, 25 nt, Artificial Sequence
  Description of Artificial Sequence: Synthetic oligonucleotide
agggucggaacccaagcuuagaacu

SEQ ID NO: 150247 - RNA, 25 nt, Artificial Sequence
  Description of Artificial Sequence: Synthetic oligonucleotide
ucggaacccaagcuuagaacuuuaa

SEQ ID NO: 150248 - RNA, 25 nt, Artificial Sequence
  Description of Artificial Sequence: Synthetic oligonucleotide
acccaagcuuagaacuuuaagcaac

SEQ ID NO: 150249 - RNA, 25 nt, Artificial Sequence
  Description of Artificial Sequence: Synthetic oligonucleotide
gaacuuuaagcaacaagaccaccac

SEQ ID NO: 150250 - RNA, 25 nt, Artificial Sequence
  Description of Artificial Sequence: Synthetic oligonucleotide
acuauucaguggcgagaaauaaagu

SEQ ID NO: 150251 - RNA, 25 nt, Artificial Sequence
  Description of Artificial Sequence: Synthetic oligonucleotide
cuauucaguggcgagaaauaaaguu

SEQ ID NO: 150252 - RNA, 25 nt, Artificial Sequence
  Description of Artificial Sequence: Synthetic oligonucleotide
aaacacagauaacaggaaaugaucc

SEQ ID NO: 150253 - RNA, 25 nt, Artificial Sequence
  Description of Artificial Sequence: Synthetic oligonucleotide
cuuaagaaaagagaagaaaugaaac

SEQ ID NO: 150254 - RNA, 25 nt, Artificial Sequence
  Description of Artificial Sequence: Synthetic oligonucleotide
cugaaggaguguguuuccauccucc

SEQ ID NO: 150255 - RNA, 25 nt, Artificial Sequence
  Description of Artificial Sequence: Synthetic oligonucleotide
ucaccgcgggacugaaaaucuuuga

SEQ ID NO: 150256 - RNA, 25 nt, Artificial Sequence
  Description of Artificial Sequence: Synthetic oligonucleotide
agcagaaauaagcgugccguucagg

SEQ ID NO: 150257 - RNA, 25 nt, Artificial Sequence
  Description of Artificial Sequence: Synthetic oligonucleotide
aagcgugccguucaggguccagaag

SEQ ID NO: 150258 - RNA, 25 nt, Artificial Sequence
  Description of Artificial Sequence: Synthetic oligonucleotide
agaaacagucacucaagacugcuug

SEQ ID NO: 150259 - RNA, 25 nt, Artificial Sequence
  Description of Artificial Sequence: Synthetic oligonucleotide
agaggaagaagguccaugucuuugg

SEQ ID NO: 150260 - RNA, 25 nt, Artificial Sequence
  Description of Artificial Sequence: Synthetic oligonucleotide
uguauucaaaauaugccugaaacac

SEQ ID NO: 150261 - RNA, 25 nt, Artificial Sequence
  Description of Artificial Sequence: Synthetic oligonucleotide
auuuuccucccuuucucuguaccuc

SEQ ID NO: 150262 - RNA, 25 nt, Artificial Sequence
  Description of Artificial Sequence: Synthetic oligonucleotide
caaagaaagauagagcaagacaaga

SEQ ID NO: 150263 - RNA, 25 nt, Artificial Sequence
  Description of Artificial Sequence: Synthetic oligonucleotide
aagaaagauagagcaagacaagaaa

SEQ ID NO: 150264 - RNA, 25 nt, Artificial Sequence
  Description of Artificial Sequence: Synthetic oligonucleotide
gaaagcauuuguuuguacaagaucc

SEQ ID NO: 150265 - RNA, 25 nt, Artificial Sequence
  Description of Artificial Sequence: Synthetic oligonucleotide
ugaguuaaacgaacguacuugcaga

SEQ ID NO: 150266 - RNA, 25 nt, Artificial Sequence
  Description of Artificial Sequence: Synthetic oligonucleotide
acugauacagaacgaucgauacaga

SEQ ID NO: 150267 - RNA, 25 nt, Artificial Sequence
  Description of Artificial Sequence: Synthetic oligonucleotide
auauuauauauauauaaaaauaaau

SEQ ID NO: 150268 - RNA, 25 nt, Artificial Sequence
  Description of Artificial Sequence: Synthetic oligonucleotide
auuauauauauauaaaaauaaauau

SEQ ID NO: 150269 - RNA, 25 nt, Artificial Sequence
  Description of Artificial Sequence: Synthetic oligonucleotide
ucacuggauguauuugacugcugug

SEQ ID NO: 150270 - RNA, 25 nt, Artificial Sequence
  Description of Artificial Sequence: Synthetic oligonucleotide
cagggaagaggaggagaugagagac

SEQ ID NO: 150271 - RNA, 25 nt, Artificial Sequence
  Description of Artificial Sequence: Synthetic oligonucleotide
augaucuuuuuuuugucccacuugg

SEQ ID NO: 150272 - RNA, 27 nt, Artificial Sequence
  Description of Artificial Sequence: Synthetic oligonucleotide
ggccgugaacuccucaucaaaauaccu

SEQ ID NO: 150273 - RNA, 27 nt, Artificial Sequence
  Description of Artificial Sequence: Synthetic oligonucleotide
uggugugauggugaucaucugggccgu

SEQ ID NO: 150274 - RNA, 27 nt, Artificial Sequence
  Description of Artificial Sequence: Synthetic oligonucleotide
aaacccgcaggauaguuuucuucccua

SEQ ID NO: 150275 - RNA, 27 nt, Artificial Sequence
  Description of Artificial Sequence: Synthetic oligonucleotide
caaacuggaugaaauaaauuaaaaccc

SEQ ID NO: 150276 - RNA, 27 nt, Artificial Sequence
  Description of Artificial Sequence: Synthetic oligonucleotide
agaaguccuuaacauuucccuacguga

SEQ ID NO: 150277 - RNA, 27 nt, Artificial Sequence
  Description of Artificial Sequence: Synthetic oligonucleotide
cucugucccacuggguaaacccuggcc

SEQ ID NO: 150278 - RNA, 27 nt, Artificial Sequence
  Description of Artificial Sequence: Synthetic oligonucleotide
cacaauaacaaauuuaaaccuugcucc

SEQ ID NO: 150279 - RNA, 27 nt, Artificial Sequence
  Description of Artificial Sequence: Synthetic oligonucleotide
aaaugcauuugaacaacauaauacaca

SEQ ID NO: 150280 - RNA, 27 nt, Artificial Sequence
  Description of Artificial Sequence: Synthetic oligonucleotide
ggcuuuccugucacaaagauuaaaaac

SEQ ID NO: 150281 - RNA, 27 nt, Artificial Sequence
  Description of Artificial Sequence: Synthetic oligonucleotide
agggcuuuccugucacaaagauuaaaa

SEQ ID NO: 150282 - RNA, 27 nt, Artificial Sequence
  Description of Artificial Sequence: Synthetic oligonucleotide
ggccaugcugggagacauaagcagcag

SEQ ID NO: 150283 - RNA, 27 nt, Artificial Sequence
  Description of Artificial Sequence: Synthetic oligonucleotide
ucagggagaagcuucugaaacacuucu

SEQ ID NO: 150284 - RNA, 27 nt, Artificial Sequence
  Description of Artificial Sequence: Synthetic oligonucleotide
aagggcuucuuccuuauugauggucag

SEQ ID NO: 150285 - RNA, 27 nt, Artificial Sequence
  Description of Artificial Sequence: Synthetic oligonucleotide
ugaagggcuucuuccuuauugaugguc

SEQ ID NO: 150286 - RNA, 27 nt, Artificial Sequence
  Description of Artificial Sequence: Synthetic oligonucleotide
cgcugaagggcuucuuccuuauugaug

SEQ ID NO: 150287 - RNA, 27 nt, Artificial Sequence
  Description of Artificial Sequence: Synthetic oligonucleotide
gccgcugaagggcuucuuccuuauuga

SEQ ID NO: 150288 - RNA, 27 nt, Artificial Sequence
  Description of Artificial Sequence: Synthetic oligonucleotide
acuggccgcugaagggcuucuuccuua

SEQ ID NO: 150289 - RNA, 27 nt, Artificial Sequence
  Description of Artificial Sequence: Synthetic oligonucleotide
cggagcuuuucaccuuuaguuaugcuu

SEQ ID NO: 150290 - RNA, 27 nt, Artificial Sequence
  Description of Artificial Sequence: Synthetic oligonucleotide
ccggagcuuuucaccuuuaguuaugcu

SEQ ID NO: 150291 - RNA, 27 nt, Artificial Sequence
  Description of Artificial Sequence: Synthetic oligonucleotide
cagacuguugacuggcgugauguaguu

SEQ ID NO: 150292 - RNA, 27 nt, Artificial Sequence
  Description of Artificial Sequence: Synthetic oligonucleotide
cuuuugaacucugcuuaaauccagugg

SEQ ID NO: 150293 - RNA, 27 nt, Artificial Sequence
  Description of Artificial Sequence: Synthetic oligonucleotide
gcuuuugaacucugcuuaaauccagug

SEQ ID NO: 150294 - RNA, 27 nt, Artificial Sequence
  Description of Artificial Sequence: Synthetic oligonucleotide
agggcuuuugaacucugcuuaaaucca

SEQ ID NO: 150295 - RNA, 27 nt, Artificial Sequence
  Description of Artificial Sequence: Synthetic oligonucleotide
aagggcuuuugaacucugcuuaaaucc

SEQ ID NO: 150296 - RNA, 27 nt, Artificial Sequence
  Description of Artificial Sequence: Synthetic oligonucleotide
ugaagggcuuuugaacucugcuuaaau

SEQ ID NO: 150297 - RNA, 27 nt, Artificial Sequence
  Description of Artificial Sequence: Synthetic oligonucleotide
cugaagggcuuuugaacucugcuuaaa

SEQ ID NO: 150298 - RNA, 27 nt, Artificial Sequence
  Description of Artificial Sequence: Synthetic oligonucleotide
cgcugaagggcuuuugaacucugcuua

SEQ ID NO: 150299 - RNA, 27 nt, Artificial Sequence
  Description of Artificial Sequence: Synthetic oligonucleotide
cgagcggcuucacucagacccugaggc

SEQ ID NO: 150300 - RNA, 27 nt, Artificial Sequence
  Description of Artificial Sequence: Synthetic oligonucleotide
uugacuggcgugauguaguugcuuggg

SEQ ID NO: 150301 - RNA, 27 nt, Artificial Sequence
  Description of Artificial Sequence: Synthetic oligonucleotide
cacgcaccaagaagcugccauugaucc

SEQ ID NO: 150302 - RNA, 27 nt, Artificial Sequence
  Description of Artificial Sequence: Synthetic oligonucleotide
cugaugaauccaaugugggcuggaauc

SEQ ID NO: 150303 - RNA, 27 nt, Artificial Sequence
  Description of Artificial Sequence: Synthetic oligonucleotide
cuuagguauuccacauucucagcugug

SEQ ID NO: 150304 - RNA, 27 nt, Artificial Sequence
  Description of Artificial Sequence: Synthetic oligonucleotide
ugagccucaaauuaggagauacguuuu

SEQ ID NO: 150305 - RNA, 27 nt, Artificial Sequence
  Description of Artificial Sequence: Synthetic oligonucleotide
ccaauuguagagaaauuauuuuaggaa

SEQ ID NO: 150306 - RNA, 27 nt, Artificial Sequence
  Description of Artificial Sequence: Synthetic oligonucleotide
ggcuccuaacuagcugaaucuuccaau

SEQ ID NO: 150307 - RNA, 27 nt, Artificial Sequence
  Description of Artificial Sequence: Synthetic oligonucleotide
guggauauugacuaggagaguuuaaaa

SEQ ID NO: 150308 - RNA, 27 nt, Artificial Sequence
  Description of Artificial Sequence: Synthetic oligonucleotide
ugugacugaacauaacuguaggcugaa

SEQ ID NO: 150309 - RNA, 27 nt, Artificial Sequence
  Description of Artificial Sequence: Synthetic oligonucleotide
guaugugugugugacugaacauaacug

SEQ ID NO: 150310 - RNA, 27 nt, Artificial Sequence
  Description of Artificial Sequence: Synthetic oligonucleotide
aagcaaaaggaacauuuuguaugugug

SEQ ID NO: 150311 - RNA, 27 nt, Artificial Sequence
  Description of Artificial Sequence: Synthetic oligonucleotide
aaaaauuacuuuaaaagcaaaaggaac

SEQ ID NO: 150312 - RNA, 27 nt, Artificial Sequence
  Description of Artificial Sequence: Synthetic oligonucleotide
ccauugacuguugcuucacaggucaga

SEQ ID NO: 150313 - RNA, 27 nt, Artificial Sequence
  Description of Artificial Sequence: Synthetic oligonucleotide
auugguuugucgaugugugagauaguu

SEQ ID NO: 150314 - RNA, 27 nt, Artificial Sequence
  Description of Artificial Sequence: Synthetic oligonucleotide
agugguagcaguacaauugaggacaag

SEQ ID NO: 150315 - RNA, 27 nt, Artificial Sequence
  Description of Artificial Sequence: Synthetic oligonucleotide
uaagaccgcuugccagcuacgguuuca

SEQ ID NO: 150316 - RNA, 27 nt, Artificial Sequence
  Description of Artificial Sequence: Synthetic oligonucleotide
agccgguaagaccgcuugccagcuacg

SEQ ID NO: 150317 - RNA, 27 nt, Artificial Sequence
  Description of Artificial Sequence: Synthetic oligonucleotide
gguaacccaucuuuuaaccauacaacu

SEQ ID NO: 150318 - RNA, 27 nt, Artificial Sequence
  Description of Artificial Sequence: Synthetic oligonucleotide
ucgcagguaacccaucuuuuaaccaua

SEQ ID NO: 150319 - RNA, 27 nt, Artificial Sequence
  Description of Artificial Sequence: Synthetic oligonucleotide
cucagcaagauuguauaauucccugca

SEQ ID NO: 150320 - RNA, 27 nt, Artificial Sequence
  Description of Artificial Sequence: Synthetic oligonucleotide
acuguuuuaugcucagcaagauuguau

SEQ ID NO: 150321 - RNA, 27 nt, Artificial Sequence
  Description of Artificial Sequence: Synthetic oligonucleotide
aggauaaaggacucuucauuauuggaa

SEQ ID NO: 150322 - RNA, 27 nt, Artificial Sequence
  Description of Artificial Sequence: Synthetic oligonucleotide
caacuugcguuggaacauccaaagugu

SEQ ID NO: 150323 - RNA, 27 nt, Artificial Sequence
  Description of Artificial Sequence: Synthetic oligonucleotide
augguuucaguuuaguggaagcauuua

SEQ ID NO: 150324 - RNA, 27 nt, Artificial Sequence
  Description of Artificial Sequence: Synthetic oligonucleotide
auauuuaacaaagucaaacuuucucac

SEQ ID NO: 150325 - RNA, 27 nt, Artificial Sequence
  Description of Artificial Sequence: Synthetic oligonucleotide
aacuuuuaauauacaguaguucuuuuc

SEQ ID NO: 150326 - RNA, 27 nt, Artificial Sequence
  Description of Artificial Sequence: Synthetic oligonucleotide
guuaagucaaaacccguauuucuaaag

SEQ ID NO: 150327 - RNA, 27 nt, Artificial Sequence
  Description of Artificial Sequence: Synthetic oligonucleotide
gugcugaguuugcuguacccauguuga

SEQ ID NO: 150328 - RNA, 27 nt, Artificial Sequence
  Description of Artificial Sequence: Synthetic oligonucleotide
ugaggucagcaucuucugugucuuuac

SEQ ID NO: 150329 - RNA, 27 nt, Artificial Sequence
  Description of Artificial Sequence: Synthetic oligonucleotide
gcgaucugaauaaaccucccuacuagc

SEQ ID NO: 150330 - RNA, 27 nt, Artificial Sequence
  Description of Artificial Sequence: Synthetic oligonucleotide
aucccagaacccugcugcagaaggcca

SEQ ID NO: 150331 - RNA, 27 nt, Artificial Sequence
  Description of Artificial Sequence: Synthetic oligonucleotide
cauaauuuccaauauguaccagaccuu

SEQ ID NO: 150332 - RNA, 27 nt, Artificial Sequence
  Description of Artificial Sequence: Synthetic oligonucleotide
cuagugcuuccaucggaaggacuaggu

SEQ ID NO: 150333 - RNA, 27 nt, Artificial Sequence
  Description of Artificial Sequence: Synthetic oligonucleotide
uccacauaaaaacaauauucacuggga

SEQ ID NO: 150334 - RNA, 27 nt, Artificial Sequence
  Description of Artificial Sequence: Synthetic oligonucleotide
ucuaccaauuccaacuugaauucauug

SEQ ID NO: 150335 - RNA, 27 nt, Artificial Sequence
  Description of Artificial Sequence: Synthetic oligonucleotide
ucuccaagucuaaaucuguguccugag

SEQ ID NO: 150336 - RNA, 27 nt, Artificial Sequence
  Description of Artificial Sequence: Synthetic oligonucleotide
uggaauacuguaacugugcuuugagga

SEQ ID NO: 150337 - RNA, 27 nt, Artificial Sequence
  Description of Artificial Sequence: Synthetic oligonucleotide
uuaauucaucagugguggcagugguag

SEQ ID NO: 150338 - RNA, 27 nt, Artificial Sequence
  Description of Artificial Sequence: Synthetic oligonucleotide
gugaugauguggcacuaguaguuucuu

SEQ ID NO: 150339 - RNA, 27 nt, Artificial Sequence
  Description of Artificial Sequence: Synthetic oligonucleotide
ucuguuuggugaggcuguccgacuuug

SEQ ID NO: 150340 - RNA, 27 nt, Artificial Sequence
  Description of Artificial Sequence: Synthetic oligonucleotide
ccaucauguuccauuuuucgcuuucuc

SEQ ID NO: 150341 - RNA, 27 nt, Artificial Sequence
  Description of Artificial Sequence: Synthetic oligonucleotide
gcagucuacaugcuaaaucagagggua

SEQ ID NO: 150342 - RNA, 27 nt, Artificial Sequence
  Description of Artificial Sequence: Synthetic oligonucleotide
cauaaauagauccuuaaauagcucaaa

SEQ ID NO: 150343 - RNA, 27 nt, Artificial Sequence
  Description of Artificial Sequence: Synthetic oligonucleotide
ugauaauagugcuuuuucaccuuuuuc

SEQ ID NO: 150344 - RNA, 27 nt, Artificial Sequence
  Description of Artificial Sequence: Synthetic oligonucleotide
gcagaacugauaauagugcuuuuucac

SEQ ID NO: 150345 - RNA, 27 nt, Artificial Sequence
  Description of Artificial Sequence: Synthetic oligonucleotide
guagguuuaaucuuucuuuucagccau

SEQ ID NO: 150346 - RNA, 27 nt, Artificial Sequence
  Description of Artificial Sequence: Synthetic oligonucleotide
agaaggauuuuauuauaaggguuuaau

SEQ ID NO: 150347 - RNA, 27 nt, Artificial Sequence
  Description of Artificial Sequence: Synthetic oligonucleotide
gucuacagcauuggcuaauaguaugaa

SEQ ID NO: 150348 - RNA, 27 nt, Artificial Sequence
  Description of Artificial Sequence: Synthetic oligonucleotide
cuauuccuaucaaaaugcuucugucua

SEQ ID NO: 150349 - RNA, 27 nt, Artificial Sequence
  Description of Artificial Sequence: Synthetic oligonucleotide
ucagggccauuaucuuauuugcucuau

SEQ ID NO: 150350 - RNA, 27 nt, Artificial Sequence
  Description of Artificial Sequence: Synthetic oligonucleotide
ugcuugaggaagagaaaaauguugguc

SEQ ID NO: 150351 - RNA, 27 nt, Artificial Sequence
  Description of Artificial Sequence: Synthetic oligonucleotide
ugggcugaacuuuucucauacuuaaag

SEQ ID NO: 150352 - RNA, 27 nt, Artificial Sequence
  Description of Artificial Sequence: Synthetic oligonucleotide
gguucagcagccaucuuuauuccugcg

SEQ ID NO: 150353 - RNA, 27 nt, Artificial Sequence
  Description of Artificial Sequence: Synthetic oligonucleotide
ugaagagaacuuggucauucaaauuuc

SEQ ID NO: 150354 - RNA, 27 nt, Artificial Sequence
  Description of Artificial Sequence: Synthetic oligonucleotide
cucuaggcuggcuaucuuuauacauac

SEQ ID NO: 150355 - RNA, 27 nt, Artificial Sequence
  Description of Artificial Sequence: Synthetic oligonucleotide
acacuucacagagauaguuacagccau

SEQ ID NO: 150356 - RNA, 27 nt, Artificial Sequence
  Description of Artificial Sequence: Synthetic oligonucleotide
uugaaauuuucucacacuucacagaga

SEQ ID NO: 150357 - RNA, 27 nt, Artificial Sequence
  Description of Artificial Sequence: Synthetic oligonucleotide
ucaggaggauucauuuccuuaaaggaa

SEQ ID NO: 150358 - RNA, 27 nt, Artificial Sequence
  Description of Artificial Sequence: Synthetic oligonucleotide
auaugaugucacuuuuuguauccuuga

SEQ ID NO: 150359 - RNA, 27 nt, Artificial Sequence
  Description of Artificial Sequence: Synthetic oligonucleotide
uaugaugaagauucaaauugcaucuua

SEQ ID NO: 150360 - RNA, 27 nt, Artificial Sequence
  Description of Artificial Sequence: Synthetic oligonucleotide
uuaauagcuagucuucguuuugaacag

SEQ ID NO: 150361 - RNA, 27 nt, Artificial Sequence
  Description of Artificial Sequence: Synthetic oligonucleotide
auuuuuaguagagaugagguuucacca

SEQ ID NO: 150362 - RNA, 27 nt, Artificial Sequence
  Description of Artificial Sequence: Synthetic oligonucleotide
aggcgagauagagcuucucuuucguuc

SEQ ID NO: 150363 - RNA, 27 nt, Artificial Sequence
  Description of Artificial Sequence: Synthetic oligonucleotide
aacuggaccgaaggcgcuuguggagaa

SEQ ID NO: 150364 - RNA, 27 nt, Artificial Sequence
  Description of Artificial Sequence: Synthetic oligonucleotide
gcggcuacaucuuuggaaucuucuccu

SEQ ID NO: 150365 - RNA, 27 nt, Artificial Sequence
  Description of Artificial Sequence: Synthetic oligonucleotide
caagucuccucauugaauccagauugg

SEQ ID NO: 150366 - RNA, 27 nt, Artificial Sequence
  Description of Artificial Sequence: Synthetic oligonucleotide
uccucacuacucucaaaucuguucugg

SEQ ID NO: 150367 - RNA, 27 nt, Artificial Sequence
  Description of Artificial Sequence: Synthetic oligonucleotide
uuuguacucaucugcacagcucuggcu

SEQ ID NO: 150368 - RNA, 27 nt, Artificial Sequence
  Description of Artificial Sequence: Synthetic oligonucleotide
gcccauuaacaacaacaaucugaggug

SEQ ID NO: 150369 - RNA, 27 nt, Artificial Sequence
  Description of Artificial Sequence: Synthetic oligonucleotide
aauaaauuaaaaauaauuaaaauagug

SEQ ID NO: 150370 - RNA, 27 nt, Artificial Sequence
  Description of Artificial Sequence: Synthetic oligonucleotide
cauauuuaaauauuaauaaauuaaaaa

SEQ ID NO: 150371 - RNA, 27 nt, Artificial Sequence
  Description of Artificial Sequence: Synthetic oligonucleotide
gaaacaaaggauauucaaacugcauag

SEQ ID NO: 150372 - RNA, 27 nt, Artificial Sequence
  Description of Artificial Sequence: Synthetic oligonucleotide
caaacacuuagacgccagcagcauggg

SEQ ID NO: 150373 - RNA, 27 nt, Artificial Sequence
  Description of Artificial Sequence: Synthetic oligonucleotide
uuugucacaggugaaaugcacaucuga

SEQ ID NO: 150374 - RNA, 27 nt, Artificial Sequence
  Description of Artificial Sequence: Synthetic oligonucleotide
uaauucagccuggcacagguuuugauc

SEQ ID NO: 150375 - RNA, 27 nt, Artificial Sequence
  Description of Artificial Sequence: Synthetic oligonucleotide
auuguaagaaugacuacccacauucac

SEQ ID NO: 150376 - RNA, 27 nt, Artificial Sequence
  Description of Artificial Sequence: Synthetic oligonucleotide
caauuguaagaaugacuacccacauuc

SEQ ID NO: 150377 - RNA, 27 nt, Artificial Sequence
  Description of Artificial Sequence: Synthetic oligonucleotide
guacacucucugaugcucauuuucaua

SEQ ID NO: 150378 - RNA, 27 nt, Artificial Sequence
  Description of Artificial Sequence: Synthetic oligonucleotide
cugcugaguucuacaugaaaagcaaau

SEQ ID NO: 150379 - RNA, 27 nt, Artificial Sequence
  Description of Artificial Sequence: Synthetic oligonucleotide
uacugaaaauaaauauagaaauacaac

SEQ ID NO: 150380 - RNA, 27 nt, Artificial Sequence
  Description of Artificial Sequence: Synthetic oligonucleotide
uuccauuuaagaaacauuaaucaaaac

SEQ ID NO: 150381 - RNA, 27 nt, Artificial Sequence
  Description of Artificial Sequence: Synthetic oligonucleotide
acaauuuuaggcacuauacacguuguu

SEQ ID NO: 150382 - RNA, 27 nt, Artificial Sequence
  Description of Artificial Sequence: Synthetic oligonucleotide
ccagauguuaguagccaaggauauggu

SEQ ID NO: 150383 - RNA, 27 nt, Artificial Sequence
  Description of Artificial Sequence: Synthetic oligonucleotide
agcucacagucuccagauguuaguagc

SEQ ID NO: 150384 - RNA, 27 nt, Artificial Sequence
  Description of Artificial Sequence: Synthetic oligonucleotide
auuaauaaaaagcacacaacuuauggc

SEQ ID NO: 150385 - RNA, 27 nt, Artificial Sequence
  Description of Artificial Sequence: Synthetic oligonucleotide
aauguaagaagagccaaaaugaugcau

SEQ ID NO: 150386 - RNA, 27 nt, Artificial Sequence
  Description of Artificial Sequence: Synthetic oligonucleotide
acauuuuuacaaauguaagaagagcca

SEQ ID NO: 150387 - RNA, 27 nt, Artificial Sequence
  Description of Artificial Sequence: Synthetic oligonucleotide
aauaugaauuaagaugaccuaaucugu

SEQ ID NO: 150388 - RNA, 27 nt, Artificial Sequence
  Description of Artificial Sequence: Synthetic oligonucleotide
ucaugauuaguucuuucaauuccaucc

SEQ ID NO: 150389 - RNA, 27 nt, Artificial Sequence
  Description of Artificial Sequence: Synthetic oligonucleotide
cccaagagcagaaggaaugagugugca

SEQ ID NO: 150390 - RNA, 27 nt, Artificial Sequence
  Description of Artificial Sequence: Synthetic oligonucleotide
cucaaagcuacugguuaccucuacacc

SEQ ID NO: 150391 - RNA, 27 nt, Artificial Sequence
  Description of Artificial Sequence: Synthetic oligonucleotide
ugaaauauuacguggcaugugguuggg

SEQ ID NO: 150392 - RNA, 27 nt, Artificial Sequence
  Description of Artificial Sequence: Synthetic oligonucleotide
agugaagagaauaacuuguuuccgaag

SEQ ID NO: 150393 - RNA, 27 nt, Artificial Sequence
  Description of Artificial Sequence: Synthetic oligonucleotide
uuucuuagcauuaguuauugggaguga

SEQ ID NO: 150394 - RNA, 27 nt, Artificial Sequence
  Description of Artificial Sequence: Synthetic oligonucleotide
uugauuuucagcauuucuuagcauuag

SEQ ID NO: 150395 - RNA, 27 nt, Artificial Sequence
  Description of Artificial Sequence: Synthetic oligonucleotide
aaaguaaucauauuuagagaaagacag

SEQ ID NO: 150396 - RNA, 27 nt, Artificial Sequence
  Description of Artificial Sequence: Synthetic oligonucleotide
uguagaacaaaaugccugaaauucagc

SEQ ID NO: 150397 - RNA, 27 nt, Artificial Sequence
  Description of Artificial Sequence: Synthetic oligonucleotide
gagagucccgggugagagggaaucgcc

SEQ ID NO: 150398 - RNA, 27 nt, Artificial Sequence
  Description of Artificial Sequence: Synthetic oligonucleotide
cuuuacuuuaaagguucacuuuccuug

SEQ ID NO: 150399 - RNA, 27 nt, Artificial Sequence
  Description of Artificial Sequence: Synthetic oligonucleotide
ccaggcuuccagagcaugcagccuccu

SEQ ID NO: 150400 - RNA, 27 nt, Artificial Sequence
  Description of Artificial Sequence: Synthetic oligonucleotide
cucucuuuuguuuucuguucagagaaa

SEQ ID NO: 150401 - RNA, 27 nt, Artificial Sequence
  Description of Artificial Sequence: Synthetic oligonucleotide
cggcauaacugauuacagccaaguuca

SEQ ID NO: 150402 - RNA, 27 nt, Artificial Sequence
  Description of Artificial Sequence: Synthetic oligonucleotide
uggacuucuuuuaauuuuggcuucuuc

SEQ ID NO: 150403 - RNA, 27 nt, Artificial Sequence
  Description of Artificial Sequence: Synthetic oligonucleotide
uaaccucaccuggacuucuuuuaauuu

SEQ ID NO: 150404 - RNA, 27 nt, Artificial Sequence
  Description of Artificial Sequence: Synthetic oligonucleotide
guccucuucccgauaauccggauucag

SEQ ID NO: 150405 - RNA, 27 nt, Artificial Sequence
  Description of Artificial Sequence: Synthetic oligonucleotide
acaauacuugcuuugaugucacauuaa

SEQ ID NO: 150406 - RNA, 27 nt, Artificial Sequence
  Description of Artificial Sequence: Synthetic oligonucleotide
gagugcuacaauacuugcuuugauguc

SEQ ID NO: 150407 - RNA, 27 nt, Artificial Sequence
  Description of Artificial Sequence: Synthetic oligonucleotide
auuugugguuuuguuuucucucucucu

SEQ ID NO: 150408 - RNA, 27 nt, Artificial Sequence
  Description of Artificial Sequence: Synthetic oligonucleotide
uguaugggcuuaaauacuacagcgagg

SEQ ID NO: 150409 - RNA, 27 nt, Artificial Sequence
  Description of Artificial Sequence: Synthetic oligonucleotide
cuguaugggcuuaaauacuacagcgag

SEQ ID NO: 150410 - RNA, 27 nt, Artificial Sequence
  Description of Artificial Sequence: Synthetic oligonucleotide
ggaagguuucuguaugggcuuaaauac

SEQ ID NO: 150411 - RNA, 27 nt, Artificial Sequence
  Description of Artificial Sequence: Synthetic oligonucleotide
guagguauaccauguuuauuuuaauac

SEQ ID NO: 150412 - RNA, 27 nt, Artificial Sequence
  Description of Artificial Sequence: Synthetic oligonucleotide
uccgaaaacuggccgaucagaacagcc

SEQ ID NO: 150413 - RNA, 27 nt, Artificial Sequence
  Description of Artificial Sequence: Synthetic oligonucleotide
cccuguuccaaaguucaaauuauuugu

SEQ ID NO: 150414 - RNA, 27 nt, Artificial Sequence
  Description of Artificial Sequence: Synthetic oligonucleotide
acuggaaaguuaaauuaaggucgcaau

SEQ ID NO: 150415 - RNA, 27 nt, Artificial Sequence
  Description of Artificial Sequence: Synthetic oligonucleotide
caaaaccaaacuuuagcuuucucagcc

SEQ ID NO: 150416 - RNA, 27 nt, Artificial Sequence
  Description of Artificial Sequence: Synthetic oligonucleotide
uacagugggaaguagcaucuuuacuuu

SEQ ID NO: 150417 - RNA, 27 nt, Artificial Sequence
  Description of Artificial Sequence: Synthetic oligonucleotide
ucauaugguaucagcaauuaagcagua

SEQ ID NO: 150418 - RNA, 27 nt, Artificial Sequence
  Description of Artificial Sequence: Synthetic oligonucleotide
cagcccauguuucauucauaugguauc

SEQ ID NO: 150419 - RNA, 27 nt, Artificial Sequence
  Description of Artificial Sequence: Synthetic oligonucleotide
uaugaaaaaguuggauaagaaaguugg

SEQ ID NO: 150420 - RNA, 27 nt, Artificial Sequence
  Description of Artificial Sequence: Synthetic oligonucleotide
uccggccucaugaugucaugcaaggcu

SEQ ID NO: 150421 - RNA, 27 nt, Artificial Sequence
  Description of Artificial Sequence: Synthetic oligonucleotide
acaaaugcagucauauacaaauucagg

SEQ ID NO: 150422 - RNA, 27 nt, Artificial Sequence
  Description of Artificial Sequence: Synthetic oligonucleotide
gguaguaaacauucuacuaggauucuu

SEQ ID NO: 150423 - RNA, 27 nt, Artificial Sequence
  Description of Artificial Sequence: Synthetic oligonucleotide
uuucaucaaaaaauucuucccuuucug

SEQ ID NO: 150424 - RNA, 27 nt, Artificial Sequence
  Description of Artificial Sequence: Synthetic oligonucleotide
aaauucacacacuggcaugccgauagc

SEQ ID NO: 150425 - RNA, 27 nt, Artificial Sequence
  Description of Artificial Sequence: Synthetic oligonucleotide
acauacauugcucuacuaugaggugaa

SEQ ID NO: 150426 - RNA, 27 nt, Artificial Sequence
  Description of Artificial Sequence: Synthetic oligonucleotide
uauauaugugcuuuggcaauucuggug

SEQ ID NO: 150427 - RNA, 27 nt, Artificial Sequence
  Description of Artificial Sequence: Synthetic oligonucleotide
ggagaaacuauuacccagaucaccacu

SEQ ID NO: 150428 - RNA, 27 nt, Artificial Sequence
  Description of Artificial Sequence: Synthetic oligonucleotide
auuuggagaaacuauuacccagaucac

SEQ ID NO: 150429 - RNA, 27 nt, Artificial Sequence
  Description of Artificial Sequence: Synthetic oligonucleotide
uuucuaggaaguauucaucacauccac

SEQ ID NO: 150430 - RNA, 27 nt, Artificial Sequence
  Description of Artificial Sequence: Synthetic oligonucleotide
cauauaugguguagcuguggaaaugcg

SEQ ID NO: 150431 - RNA, 27 nt, Artificial Sequence
  Description of Artificial Sequence: Synthetic oligonucleotide
cuccauucauauaugguguagcugugg

SEQ ID NO: 150432 - RNA, 27 nt, Artificial Sequence
  Description of Artificial Sequence: Synthetic oligonucleotide
aucuucuucucguguaagaacugcagc

SEQ ID NO: 150433 - RNA, 27 nt, Artificial Sequence
  Description of Artificial Sequence: Synthetic oligonucleotide
ucccuguaaaugaucuucuucucgugu

SEQ ID NO: 150434 - RNA, 27 nt, Artificial Sequence
  Description of Artificial Sequence: Synthetic oligonucleotide
gucccuguaaaugaucuucuucucgug

SEQ ID NO: 150435 - RNA, 27 nt, Artificial Sequence
  Description of Artificial Sequence: Synthetic oligonucleotide
ucaggucccuguaaaugaucuucuucu

SEQ ID NO: 150436 - RNA, 27 nt, Artificial Sequence
  Description of Artificial Sequence: Synthetic oligonucleotide
gaugcagucaaacaccucuuccucugu

SEQ ID NO: 150437 - RNA, 27 nt, Artificial Sequence
  Description of Artificial Sequence: Synthetic oligonucleotide
cgaugcagucaaacaccucuuccucug

SEQ ID NO: 150438 - RNA, 27 nt, Artificial Sequence
  Description of Artificial Sequence: Synthetic oligonucleotide
cccugugaacucgcccucaaaguagcg

SEQ ID NO: 150439 - RNA, 27 nt, Artificial Sequence
  Description of Artificial Sequence: Synthetic oligonucleotide
ggacagaggugccaggagaugcccuca

SEQ ID NO: 150440 - RNA, 27 nt, Artificial Sequence
  Description of Artificial Sequence: Synthetic oligonucleotide
uuaaaaagacaaaccauaucacuccuu

SEQ ID NO: 150441 - RNA, 27 nt, Artificial Sequence
  Description of Artificial Sequence: Synthetic oligonucleotide
cuuaaaaagacaaaccauaucacuccu

SEQ ID NO: 150442 - RNA, 27 nt, Artificial Sequence
  Description of Artificial Sequence: Synthetic oligonucleotide
gacaaccuuuaggaucuuuacugcaac

SEQ ID NO: 150443 - RNA, 27 nt, Artificial Sequence
  Description of Artificial Sequence: Synthetic oligonucleotide
gucgacaaccuuuaggaucuuuacugc

SEQ ID NO: 150444 - RNA, 27 nt, Artificial Sequence
  Description of Artificial Sequence: Synthetic oligonucleotide
acaauugccagguuguccuuugucaug

SEQ ID NO: 150445 - RNA, 27 nt, Artificial Sequence
  Description of Artificial Sequence: Synthetic oligonucleotide
ccucgcaccacugggucacaauugcca

SEQ ID NO: 150446 - RNA, 27 nt, Artificial Sequence
  Description of Artificial Sequence: Synthetic oligonucleotide
auuucaugucucuauggaugauguucu

SEQ ID NO: 150447 - RNA, 27 nt, Artificial Sequence
  Description of Artificial Sequence: Synthetic oligonucleotide
uggagaaauauauuguuggauuucaug

SEQ ID NO: 150448 - RNA, 27 nt, Artificial Sequence
  Description of Artificial Sequence: Synthetic oligonucleotide
agccuucauggagaaauauauuguugg

SEQ ID NO: 150449 - RNA, 27 nt, Artificial Sequence
  Description of Artificial Sequence: Synthetic oligonucleotide
accacuccagcgugacuuuacuguugc

SEQ ID NO: 150450 - RNA, 27 nt, Artificial Sequence
  Description of Artificial Sequence: Synthetic oligonucleotide
ccucucuuccuuuacuuucuucacaca

SEQ ID NO: 150451 - RNA, 27 nt, Artificial Sequence
  Description of Artificial Sequence: Synthetic oligonucleotide
gcccgaugcaaggauggcucggaagcg

SEQ ID NO: 150452 - RNA, 27 nt, Artificial Sequence
  Description of Artificial Sequence: Synthetic oligonucleotide
cacaguaggauauucaaccuccauuuc

SEQ ID NO: 150453 - RNA, 27 nt, Artificial Sequence
  Description of Artificial Sequence: Synthetic oligonucleotide
uuacacaguaggauauucaaccuccau

SEQ ID NO: 150454 - RNA, 27 nt, Artificial Sequence
  Description of Artificial Sequence: Synthetic oligonucleotide
uacacuacaagggaaaacucaaaaucu

SEQ ID NO: 150455 - RNA, 27 nt, Artificial Sequence
  Description of Artificial Sequence: Synthetic oligonucleotide
caaucaacaaagaacaaacaggauaaa

SEQ ID NO: 150456 - RNA, 27 nt, Artificial Sequence
  Description of Artificial Sequence: Synthetic oligonucleotide
uuucaaucaacaaagaacaaacaggau

SEQ ID NO: 150457 - RNA, 27 nt, Artificial Sequence
  Description of Artificial Sequence: Synthetic oligonucleotide
auggaagaaaaagaaggcuguagagaa

SEQ ID NO: 150458 - RNA, 27 nt, Artificial Sequence
  Description of Artificial Sequence: Synthetic oligonucleotide
uagaaggaagauuagcuauggaagaaa

SEQ ID NO: 150459 - RNA, 27 nt, Artificial Sequence
  Description of Artificial Sequence: Synthetic oligonucleotide
augaagcauucaacaggaagauuauuu

SEQ ID NO: 150460 - RNA, 27 nt, Artificial Sequence
  Description of Artificial Sequence: Synthetic oligonucleotide
caugaagcauucaacaggaagauuauu

SEQ ID NO: 150461 - RNA, 27 nt, Artificial Sequence
  Description of Artificial Sequence: Synthetic oligonucleotide
ucaaaguagaauucaagucaugaagca

SEQ ID NO: 150462 - RNA, 27 nt, Artificial Sequence
  Description of Artificial Sequence: Synthetic oligonucleotide
gucuguaguugcuucucucccucuuag

SEQ ID NO: 150463 - RNA, 27 nt, Artificial Sequence
  Description of Artificial Sequence: Synthetic oligonucleotide
guugaccuuggucugguaggagacggc

SEQ ID NO: 150464 - RNA, 27 nt, Artificial Sequence
  Description of Artificial Sequence: Synthetic oligonucleotide
gucgagauagucgggccgauugaucuc

SEQ ID NO: 150465 - RNA, 27 nt, Artificial Sequence
  Description of Artificial Sequence: Synthetic oligonucleotide
guuugggaagguuggauguucguccuc

SEQ ID NO: 150466 - RNA, 27 nt, Artificial Sequence
  Description of Artificial Sequence: Synthetic oligonucleotide
aguucuaagcuuggguuccgacccuaa

SEQ ID NO: 150467 - RNA, 27 nt, Artificial Sequence
  Description of Artificial Sequence: Synthetic oligonucleotide
uuaaaguucuaagcuuggguuccgacc

SEQ ID NO: 150468 - RNA, 27 nt, Artificial Sequence
  Description of Artificial Sequence: Synthetic oligonucleotide
guugcuuaaaguucuaagcuuggguuc

SEQ ID NO: 150469 - RNA, 27 nt, Artificial Sequence
  Description of Artificial Sequence: Synthetic oligonucleotide
gugguggucuuguugcuuaaaguucua

SEQ ID NO: 150470 - RNA, 27 nt, Artificial Sequence
  Description of Artificial Sequence: Synthetic oligonucleotide
acuuuauuucucgccacugaauaguag

SEQ ID NO: 150471 - RNA, 27 nt, Artificial Sequence
  Description of Artificial Sequence: Synthetic oligonucleotide
aacuuuauuucucgccacugaauagua

SEQ ID NO: 150472 - RNA, 27 nt, Artificial Sequence
  Description of Artificial Sequence: Synthetic oligonucleotide
ggaucauuuccuguuaucuguguuugu

SEQ ID NO: 150473 - RNA, 27 nt, Artificial Sequence
  Description of Artificial Sequence: Synthetic oligonucleotide
guuucauuucuucucuuuucuuaaggc

SEQ ID NO: 150474 - RNA, 27 nt, Artificial Sequence
  Description of Artificial Sequence: Synthetic oligonucleotide
ggaggauggaaacacacuccuucaguu

SEQ ID NO: 150475 - RNA, 27 nt, Artificial Sequence
  Description of Artificial Sequence: Synthetic oligonucleotide
ucaaagauuuucagucccgcggugaca

SEQ ID NO: 150476 - RNA, 27 nt, Artificial Sequence
  Description of Artificial Sequence: Synthetic oligonucleotide
ccugaacggcacgcuuauuucugcugu

SEQ ID NO: 150477 - RNA, 27 nt, Artificial Sequence
  Description of Artificial Sequence: Synthetic oligonucleotide
cuucuggacccugaacggcacgcuuau

SEQ ID NO: 150478 - RNA, 27 nt, Artificial Sequence
  Description of Artificial Sequence: Synthetic oligonucleotide
caagcagucuugagugacuguuucuuc

SEQ ID NO: 150479 - RNA, 27 nt, Artificial Sequence
  Description of Artificial Sequence: Synthetic oligonucleotide
ccaaagacauggaccuucuuccucuga

SEQ ID NO: 150480 - RNA, 27 nt, Artificial Sequence
  Description of Artificial Sequence: Synthetic oligonucleotide
guguuucaggcauauuuugaauacauc

SEQ ID NO: 150481 - RNA, 27 nt, Artificial Sequence
  Description of Artificial Sequence: Synthetic oligonucleotide
gagguacagagaaagggaggaaaauag

SEQ ID NO: 150482 - RNA, 27 nt, Artificial Sequence
  Description of Artificial Sequence: Synthetic oligonucleotide
ucuugucuugcucuaucuuucuuuggu

SEQ ID NO: 150483 - RNA, 27 nt, Artificial Sequence
  Description of Artificial Sequence: Synthetic oligonucleotide
uuucuugucuugcucuaucuuucuuug

SEQ ID NO: 150484 - RNA, 27 nt, Artificial Sequence
  Description of Artificial Sequence: Synthetic oligonucleotide
ggaucuuguacaaacaaaugcuuucuc

SEQ ID NO: 150485 - RNA, 27 nt, Artificial Sequence
  Description of Artificial Sequence: Synthetic oligonucleotide
ucugcaaguacguucguuuaacucaag

SEQ ID NO: 150486 - RNA, 27 nt, Artificial Sequence
  Description of Artificial Sequence: Synthetic oligonucleotide
ucuguaucgaucguucuguaucagucu

SEQ ID NO: 150487 - RNA, 27 nt, Artificial Sequence
  Description of Artificial Sequence: Synthetic oligonucleotide
auuuauuuuuauauauauauaauauau

SEQ ID NO: 150488 - RNA, 27 nt, Artificial Sequence
  Description of Artificial Sequence: Synthetic oligonucleotide
auauuuauuuuuauauauauauaauau

SEQ ID NO: 150489 - RNA, 27 nt, Artificial Sequence
  Description of Artificial Sequence: Synthetic oligonucleotide
cacagcagucaaauacauccagugaag

SEQ ID NO: 150490 - RNA, 27 nt, Artificial Sequence
  Description of Artificial Sequence: Synthetic oligonucleotide
gucucucaucuccuccucuucccuguc

SEQ ID NO: 150491 - RNA, 27 nt, Artificial Sequence
  Description of Artificial Sequence: Synthetic oligonucleotide
ccaagugggacaaaaaaaagaucaugc

SEQ ID NO: 150492 - RNA, 14 nt, Artificial Sequence
  Description of Artificial Sequence: Synthetic oligonucleotide
guauuuugaugagg

SEQ ID NO: 150493 - RNA, 12 nt, Artificial Sequence
  Description of Artificial Sequence: Synthetic oligonucleotide
ggcccagaugau

SEQ ID NO: 150494 - RNA, 14 nt, Artificial Sequence
  Description of Artificial Sequence: Synthetic oligonucleotide
gggaagaaaacuau

SEQ ID NO: 150495 - RNA, 15 nt, Artificial Sequence
  Description of Artificial Sequence: Synthetic oligonucleotide
guuuuaauuuauuuc

SEQ ID NO: 150496 - RNA, 12 nt, Artificial Sequence
  Description of Artificial Sequence: Synthetic oligonucleotide
acguagggaaau

SEQ ID NO: 150497 - RNA, 12 nt, Artificial Sequence
  Description of Artificial Sequence: Synthetic oligonucleotide
ccaggguuuacc

SEQ ID NO: 150498 - RNA, 11 nt, Artificial Sequence
  Description of Artificial Sequence: Synthetic oligonucleotide
agcaagguuua

SEQ ID NO: 150499 - RNA, 12 nt, Artificial Sequence
  Description of Artificial Sequence: Synthetic oligonucleotide
uguauuauguug

SEQ ID NO: 150500 - RNA, 15 nt, Artificial Sequence
  Description of Artificial Sequence: Synthetic oligonucleotide
uuuuaaucuuuguga

SEQ ID NO: 150501 - RNA, 14 nt, Artificial Sequence
  Description of Artificial Sequence: Synthetic oligonucleotide
uuaaucuuugugac

SEQ ID NO: 150502 - RNA, 13 nt, Artificial Sequence
  Description of Artificial Sequence: Synthetic oligonucleotide
gcugcuuaugucu

SEQ ID NO: 150503 - RNA, 14 nt, Artificial Sequence
  Description of Artificial Sequence: Synthetic oligonucleotide
aaguguuucagaag

SEQ ID NO: 150504 - RNA, 13 nt, Artificial Sequence
  Description of Artificial Sequence: Synthetic oligonucleotide
gaccaucaauaag

SEQ ID NO: 150505 - RNA, 13 nt, Artificial Sequence
  Description of Artificial Sequence: Synthetic oligonucleotide
ccaucaauaagga

SEQ ID NO: 150506 - RNA, 14 nt, Artificial Sequence
  Description of Artificial Sequence: Synthetic oligonucleotide
ucaauaaggaagaa

SEQ ID NO: 150507 - RNA, 14 nt, Artificial Sequence
  Description of Artificial Sequence: Synthetic oligonucleotide
aauaaggaagaagc

SEQ ID NO: 150508 - RNA, 13 nt, Artificial Sequence
  Description of Artificial Sequence: Synthetic oligonucleotide
aggaagaagcccu

SEQ ID NO: 150509 - RNA, 13 nt, Artificial Sequence
  Description of Artificial Sequence: Synthetic oligonucleotide
gcauaacuaaagg

SEQ ID NO: 150510 - RNA, 14 nt, Artificial Sequence
  Description of Artificial Sequence: Synthetic oligonucleotide
cauaacuaaaggug

SEQ ID NO: 150511 - RNA, 12 nt, Artificial Sequence
  Description of Artificial Sequence: Synthetic oligonucleotide
cuacaucacgcc

SEQ ID NO: 150512 - RNA, 12 nt, Artificial Sequence
  Description of Artificial Sequence: Synthetic oligonucleotide
acuggauuuaag

SEQ ID NO: 150513 - RNA, 12 nt, Artificial Sequence
  Description of Artificial Sequence: Synthetic oligonucleotide
cuggauuuaagc

SEQ ID NO: 150514 - RNA, 13 nt, Artificial Sequence
  Description of Artificial Sequence: Synthetic oligonucleotide
gauuuaagcagag

SEQ ID NO: 150515 - RNA, 13 nt, Artificial Sequence
  Description of Artificial Sequence: Synthetic oligonucleotide
auuuaagcagagu

SEQ ID NO: 150516 - RNA, 13 nt, Artificial Sequence
  Description of Artificial Sequence: Synthetic oligonucleotide
uuaagcagaguuc

SEQ ID NO: 150517 - RNA, 13 nt, Artificial Sequence
  Description of Artificial Sequence: Synthetic oligonucleotide
uaagcagaguuca

SEQ ID NO: 150518 - RNA, 14 nt, Artificial Sequence
  Description of Artificial Sequence: Synthetic oligonucleotide
agcagaguucaaaa

SEQ ID NO: 150519 - RNA, 12 nt, Artificial Sequence
  Description of Artificial Sequence: Synthetic oligonucleotide
cucagggucuga

SEQ ID NO: 150520 - RNA, 13 nt, Artificial Sequence
  Description of Artificial Sequence: Synthetic oligonucleotide
caagcaacuacau

SEQ ID NO: 150521 - RNA, 12 nt, Artificial Sequence
  Description of Artificial Sequence: Synthetic oligonucleotide
aucaauggcagc

SEQ ID NO: 150522 - RNA, 11 nt, Artificial Sequence
  Description of Artificial Sequence: Synthetic oligonucleotide
uuccagcccac

SEQ ID NO: 150523 - RNA, 12 nt, Artificial Sequence
  Description of Artificial Sequence: Synthetic oligonucleotide
cagcugagaaug

SEQ ID NO: 150524 - RNA, 13 nt, Artificial Sequence
  Description of Artificial Sequence: Synthetic oligonucleotide
aacguaucuccua

SEQ ID NO: 150525 - RNA, 14 nt, Artificial Sequence
  Description of Artificial Sequence: Synthetic oligonucleotide
ccuaaaauaauuuc

SEQ ID NO: 150526 - RNA, 13 nt, Artificial Sequence
  Description of Artificial Sequence: Synthetic oligonucleotide
uggaagauucagc

SEQ ID NO: 150527 - RNA, 12 nt, Artificial Sequence
  Description of Artificial Sequence: Synthetic oligonucleotide
uuaaacucuccu

SEQ ID NO: 150528 - RNA, 12 nt, Artificial Sequence
  Description of Artificial Sequence: Synthetic oligonucleotide
cagccuacaguu

SEQ ID NO: 150529 - RNA, 13 nt, Artificial Sequence
  Description of Artificial Sequence: Synthetic oligonucleotide
guuauguucaguc

SEQ ID NO: 150530 - RNA, 13 nt, Artificial Sequence
  Description of Artificial Sequence: Synthetic oligonucleotide
cacauacaaaaug

SEQ ID NO: 150531 - RNA, 9 nt, Artificial Sequence
  Description of Artificial Sequence: Synthetic oligonucleotide
uccuuuugc

SEQ ID NO: 150532 - RNA, 12 nt, Artificial Sequence
  Description of Artificial Sequence: Synthetic oligonucleotide
ugaccugugaag

SEQ ID NO: 150533 - RNA, 12 nt, Artificial Sequence
  Description of Artificial Sequence: Synthetic oligonucleotide
cuaucucacaca

SEQ ID NO: 150534 - RNA, 13 nt, Artificial Sequence
  Description of Artificial Sequence: Synthetic oligonucleotide
uguccucaauugu

SEQ ID NO: 150535 - RNA, 12 nt, Artificial Sequence
  Description of Artificial Sequence: Synthetic oligonucleotide
aaaccguagcug

SEQ ID NO: 150536 - RNA, 12 nt, Artificial Sequence
  Description of Artificial Sequence: Synthetic oligonucleotide
uagcuggcaagc

SEQ ID NO: 150537 - RNA, 14 nt, Artificial Sequence
  Description of Artificial Sequence: Synthetic oligonucleotide
uuguaugguuaaaa

SEQ ID NO: 150538 - RNA, 14 nt, Artificial Sequence
  Description of Artificial Sequence: Synthetic oligonucleotide
ugguuaaaagaugg

SEQ ID NO: 150539 - RNA, 13 nt, Artificial Sequence
  Description of Artificial Sequence: Synthetic oligonucleotide
cagggaauuauac

SEQ ID NO: 150540 - RNA, 12 nt, Artificial Sequence
  Description of Artificial Sequence: Synthetic oligonucleotide
acaaucuugcug

SEQ ID NO: 150541 - RNA, 13 nt, Artificial Sequence
  Description of Artificial Sequence: Synthetic oligonucleotide
ccaauaaugaaga

SEQ ID NO: 150542 - RNA, 13 nt, Artificial Sequence
  Description of Artificial Sequence: Synthetic oligonucleotide
acuuuggauguuc

SEQ ID NO: 150543 - RNA, 12 nt, Artificial Sequence
  Description of Artificial Sequence: Synthetic oligonucleotide
aaugcuuccacu

SEQ ID NO: 150544 - RNA, 11 nt, Artificial Sequence
  Description of Artificial Sequence: Synthetic oligonucleotide
gagaaaguuug

SEQ ID NO: 150545 - RNA, 11 nt, Artificial Sequence
  Description of Artificial Sequence: Synthetic oligonucleotide
aaagaacuacu

SEQ ID NO: 150546 - RNA, 12 nt, Artificial Sequence
  Description of Artificial Sequence: Synthetic oligonucleotide
uuagaaauacgg

SEQ ID NO: 150547 - RNA, 12 nt, Artificial Sequence
  Description of Artificial Sequence: Synthetic oligonucleotide
aacauggguaca

SEQ ID NO: 150548 - RNA, 14 nt, Artificial Sequence
  Description of Artificial Sequence: Synthetic oligonucleotide
aaagacacagaaga

SEQ ID NO: 150549 - RNA, 11 nt, Artificial Sequence
  Description of Artificial Sequence: Synthetic oligonucleotide
uaguagggagg

SEQ ID NO: 150550 - RNA, 12 nt, Artificial Sequence
  Description of Artificial Sequence: Synthetic oligonucleotide
gccuucugcagc

SEQ ID NO: 150551 - RNA, 10 nt, Artificial Sequence
  Description of Artificial Sequence: Synthetic oligonucleotide
ggucugguac

SEQ ID NO: 150552 - RNA, 12 nt, Artificial Sequence
  Description of Artificial Sequence: Synthetic oligonucleotide
cuaguccuuccg

SEQ ID NO: 150553 - RNA, 12 nt, Artificial Sequence
  Description of Artificial Sequence: Synthetic oligonucleotide
ccagugaauauu

SEQ ID NO: 150554 - RNA, 13 nt, Artificial Sequence
  Description of Artificial Sequence: Synthetic oligonucleotide
augaauucaaguu

SEQ ID NO: 150555 - RNA, 12 nt, Artificial Sequence
  Description of Artificial Sequence: Synthetic oligonucleotide
caggacacagau

SEQ ID NO: 150556 - RNA, 12 nt, Artificial Sequence
  Description of Artificial Sequence: Synthetic oligonucleotide
cucaaagcacag

SEQ ID NO: 150557 - RNA, 10 nt, Artificial Sequence
  Description of Artificial Sequence: Synthetic oligonucleotide
accacugcca

SEQ ID NO: 150558 - RNA, 13 nt, Artificial Sequence
  Description of Artificial Sequence: Synthetic oligonucleotide
gaaacuacuagug

SEQ ID NO: 150559 - RNA, 12 nt, Artificial Sequence
  Description of Artificial Sequence: Synthetic oligonucleotide
aagucggacagc

SEQ ID NO: 150560 - RNA, 13 nt, Artificial Sequence
  Description of Artificial Sequence: Synthetic oligonucleotide
gaaagcgaaaaau

SEQ ID NO: 150561 - RNA, 13 nt, Artificial Sequence
  Description of Artificial Sequence: Synthetic oligonucleotide
cccucugauuuag

SEQ ID NO: 150562 - RNA, 12 nt, Artificial Sequence
  Description of Artificial Sequence: Synthetic oligonucleotide
ugagcuauuuaa

SEQ ID NO: 150563 - RNA, 13 nt, Artificial Sequence
  Description of Artificial Sequence: Synthetic oligonucleotide
aaaaggugaaaaa

SEQ ID NO: 150564 - RNA, 14 nt, Artificial Sequence
  Description of Artificial Sequence: Synthetic oligonucleotide
gaaaaagcacuauu

SEQ ID NO: 150565 - RNA, 12 nt, Artificial Sequence
  Description of Artificial Sequence: Synthetic oligonucleotide
ggcugaaaagaa

SEQ ID NO: 150566 - RNA, 12 nt, Artificial Sequence
  Description of Artificial Sequence: Synthetic oligonucleotide
uaaacccuuaua

SEQ ID NO: 150567 - RNA, 13 nt, Artificial Sequence
  Description of Artificial Sequence: Synthetic oligonucleotide
cauacuauuagcc

SEQ ID NO: 150568 - RNA, 12 nt, Artificial Sequence
  Description of Artificial Sequence: Synthetic oligonucleotide
gacagaagcauu

SEQ ID NO: 150569 - RNA, 14 nt, Artificial Sequence
  Description of Artificial Sequence: Synthetic oligonucleotide
agagcaaauaagau

SEQ ID NO: 150570 - RNA, 14 nt, Artificial Sequence
  Description of Artificial Sequence: Synthetic oligonucleotide
ccaacauuuuucuc

SEQ ID NO: 150571 - RNA, 15 nt, Artificial Sequence
  Description of Artificial Sequence: Synthetic oligonucleotide
uuaaguaugagaaaa

SEQ ID NO: 150572 - RNA, 14 nt, Artificial Sequence
  Description of Artificial Sequence: Synthetic oligonucleotide
caggaauaaagaug

SEQ ID NO: 150573 - RNA, 13 nt, Artificial Sequence
  Description of Artificial Sequence: Synthetic oligonucleotide
aauuugaaugacc

SEQ ID NO: 150574 - RNA, 14 nt, Artificial Sequence
  Description of Artificial Sequence: Synthetic oligonucleotide
auguauaaagauag

SEQ ID NO: 150575 - RNA, 12 nt, Artificial Sequence
  Description of Artificial Sequence: Synthetic oligonucleotide
ggcuguaacuau

SEQ ID NO: 150576 - RNA, 11 nt, Artificial Sequence
  Description of Artificial Sequence: Synthetic oligonucleotide
ucugugaagug

SEQ ID NO: 150577 - RNA, 14 nt, Artificial Sequence
  Description of Artificial Sequence: Synthetic oligonucleotide
ccuuuaaggaaaug

SEQ ID NO: 150578 - RNA, 13 nt, Artificial Sequence
  Description of Artificial Sequence: Synthetic oligonucleotide
aaggauacaaaaa

SEQ ID NO: 150579 - RNA, 12 nt, Artificial Sequence
  Description of Artificial Sequence: Synthetic oligonucleotide
agaugcaauuug

SEQ ID NO: 150580 - RNA, 12 nt, Artificial Sequence
  Description of Artificial Sequence: Synthetic oligonucleotide
guucaaaacgaa

SEQ ID NO: 150581 - RNA, 11 nt, Artificial Sequence
  Description of Artificial Sequence: Synthetic oligonucleotide
gugaaaccuca

SEQ ID NO: 150582 - RNA, 13 nt, Artificial Sequence
  Description of Artificial Sequence: Synthetic oligonucleotide
acgaaagagaagc

SEQ ID NO: 150583 - RNA, 12 nt, Artificial Sequence
  Description of Artificial Sequence: Synthetic oligonucleotide
cuccacaagcgc

SEQ ID NO: 150584 - RNA, 14 nt, Artificial Sequence
  Description of Artificial Sequence: Synthetic oligonucleotide
gagaagauuccaaa

SEQ ID NO: 150585 - RNA, 13 nt, Artificial Sequence
  Description of Artificial Sequence: Synthetic oligonucleotide
aaucuggauucaa

SEQ ID NO: 150586 - RNA, 13 nt, Artificial Sequence
  Description of Artificial Sequence: Synthetic oligonucleotide
agaacagauuuga

SEQ ID NO: 150587 - RNA, 11 nt, Artificial Sequence
  Description of Artificial Sequence: Synthetic oligonucleotide
ccagagcugug

SEQ ID NO: 150588 - RNA, 12 nt, Artificial Sequence
  Description of Artificial Sequence: Synthetic oligonucleotide
ccucagauuguu

SEQ ID NO: 150589 - RNA, 12 nt, Artificial Sequence
  Description of Artificial Sequence: Synthetic oligonucleotide
cuauuuuaauua

SEQ ID NO: 150590 - RNA, 13 nt, Artificial Sequence
  Description of Artificial Sequence: Synthetic oligonucleotide
uuuaauuuauuaa

SEQ ID NO: 150591 - RNA, 12 nt, Artificial Sequence
  Description of Artificial Sequence: Synthetic oligonucleotide
augcaguuugaa

SEQ ID NO: 150592 - RNA, 11 nt, Artificial Sequence
  Description of Artificial Sequence: Synthetic oligonucleotide
caugcugcugg

SEQ ID NO: 150593 - RNA, 13 nt, Artificial Sequence
  Description of Artificial Sequence: Synthetic oligonucleotide
agaugugcauuuc

SEQ ID NO: 150594 - RNA, 12 nt, Artificial Sequence
  Description of Artificial Sequence: Synthetic oligonucleotide
ucaaaaccugug

SEQ ID NO: 150595 - RNA, 11 nt, Artificial Sequence
  Description of Artificial Sequence: Synthetic oligonucleotide
gaaugugggua

SEQ ID NO: 150596 - RNA, 10 nt, Artificial Sequence
  Description of Artificial Sequence: Synthetic oligonucleotide
auguggguag

SEQ ID NO: 150597 - RNA, 13 nt, Artificial Sequence
  Description of Artificial Sequence: Synthetic oligonucleotide
ugaaaaugagcau

SEQ ID NO: 150598 - RNA, 13 nt, Artificial Sequence
  Description of Artificial Sequence: Synthetic oligonucleotide
uugcuuuucaugu

SEQ ID NO: 150599 - RNA, 12 nt, Artificial Sequence
  Description of Artificial Sequence: Synthetic oligonucleotide
uguauuucuaua

SEQ ID NO: 150600 - RNA, 13 nt, Artificial Sequence
  Description of Artificial Sequence: Synthetic oligonucleotide
uuugauuaauguu

SEQ ID NO: 150601 - RNA, 12 nt, Artificial Sequence
  Description of Artificial Sequence: Synthetic oligonucleotide
caacguguauag

SEQ ID NO: 150602 - RNA, 12 nt, Artificial Sequence
  Description of Artificial Sequence: Synthetic oligonucleotide
cauauccuuggc

SEQ ID NO: 150603 - RNA, 13 nt, Artificial Sequence
  Description of Artificial Sequence: Synthetic oligonucleotide
uacuaacaucugg

SEQ ID NO: 150604 - RNA, 11 nt, Artificial Sequence
  Description of Artificial Sequence: Synthetic oligonucleotide
cauaaguugug

SEQ ID NO: 150605 - RNA, 12 nt, Artificial Sequence
  Description of Artificial Sequence: Synthetic oligonucleotide
gcaucauuuugg

SEQ ID NO: 150606 - RNA, 10 nt, Artificial Sequence
  Description of Artificial Sequence: Synthetic oligonucleotide
gcucuucuua

SEQ ID NO: 150607 - RNA, 10 nt, Artificial Sequence
  Description of Artificial Sequence: Synthetic oligonucleotide
agauuagguc

SEQ ID NO: 150608 - RNA, 12 nt, Artificial Sequence
  Description of Artificial Sequence: Synthetic oligonucleotide
auggaauugaaa

SEQ ID NO: 150609 - RNA, 13 nt, Artificial Sequence
  Description of Artificial Sequence: Synthetic oligonucleotide
cacacucauuccu

SEQ ID NO: 150610 - RNA, 12 nt, Artificial Sequence
  Description of Artificial Sequence: Synthetic oligonucleotide
uguagagguaac

SEQ ID NO: 150611 - RNA, 11 nt, Artificial Sequence
  Description of Artificial Sequence: Synthetic oligonucleotide
caaccacaugc

SEQ ID NO: 150612 - RNA, 12 nt, Artificial Sequence
  Description of Artificial Sequence: Synthetic oligonucleotide
ucggaaacaagu

SEQ ID NO: 150613 - RNA, 11 nt, Artificial Sequence
  Description of Artificial Sequence: Synthetic oligonucleotide
acucccaauaa

SEQ ID NO: 150614 - RNA, 13 nt, Artificial Sequence
  Description of Artificial Sequence: Synthetic oligonucleotide
aaugcuaagaaau

SEQ ID NO: 150615 - RNA, 11 nt, Artificial Sequence
  Description of Artificial Sequence: Synthetic oligonucleotide
gucuuucucua

SEQ ID NO: 150616 - RNA, 11 nt, Artificial Sequence
  Description of Artificial Sequence: Synthetic oligonucleotide
ugaauuucagg

SEQ ID NO: 150617 - RNA, 13 nt, Artificial Sequence
  Description of Artificial Sequence: Synthetic oligonucleotide
cgauucccucuca

SEQ ID NO: 150618 - RNA, 11 nt, Artificial Sequence
  Description of Artificial Sequence: Synthetic oligonucleotide
aggaaagugaa

SEQ ID NO: 150619 - RNA, 12 nt, Artificial Sequence
  Description of Artificial Sequence: Synthetic oligonucleotide
gaggcugcaugc

SEQ ID NO: 150620 - RNA, 11 nt, Artificial Sequence
  Description of Artificial Sequence: Synthetic oligonucleotide
ucucugaacag

SEQ ID NO: 150621 - RNA, 12 nt, Artificial Sequence
  Description of Artificial Sequence: Synthetic oligonucleotide
aacuuggcugua

SEQ ID NO: 150622 - RNA, 12 nt, Artificial Sequence
  Description of Artificial Sequence: Synthetic oligonucleotide
agaagccaaaau

SEQ ID NO: 150623 - RNA, 14 nt, Artificial Sequence
  Description of Artificial Sequence: Synthetic oligonucleotide
auuaaaagaagucc

SEQ ID NO: 150624 - RNA, 14 nt, Artificial Sequence
  Description of Artificial Sequence: Synthetic oligonucleotide
gaauccggauuauc

SEQ ID NO: 150625 - RNA, 12 nt, Artificial Sequence
  Description of Artificial Sequence: Synthetic oligonucleotide
aaugugacauca

SEQ ID NO: 150626 - RNA, 13 nt, Artificial Sequence
  Description of Artificial Sequence: Synthetic oligonucleotide
caucaaagcaagu

SEQ ID NO: 150627 - RNA, 11 nt, Artificial Sequence
  Description of Artificial Sequence: Synthetic oligonucleotide
agagagagaaa

SEQ ID NO: 150628 - RNA, 13 nt, Artificial Sequence
  Description of Artificial Sequence: Synthetic oligonucleotide
ucgcuguaguauu

SEQ ID NO: 150629 - RNA, 14 nt, Artificial Sequence
  Description of Artificial Sequence: Synthetic oligonucleotide
cgcuguaguauuua

SEQ ID NO: 150630 - RNA, 13 nt, Artificial Sequence
  Description of Artificial Sequence: Synthetic oligonucleotide
auuuaagcccaua

SEQ ID NO: 150631 - RNA, 15 nt, Artificial Sequence
  Description of Artificial Sequence: Synthetic oligonucleotide
auuaaaauaaacaug

SEQ ID NO: 150632 - RNA, 12 nt, Artificial Sequence
  Description of Artificial Sequence: Synthetic oligonucleotide
cuguucugaucg

SEQ ID NO: 150633 - RNA, 16 nt, Artificial Sequence
  Description of Artificial Sequence: Synthetic oligonucleotide
aaauaauuugaacuuu

SEQ ID NO: 150634 - RNA, 12 nt, Artificial Sequence
  Description of Artificial Sequence: Synthetic oligonucleotide
ugcgaccuuaau

SEQ ID NO: 150635 - RNA, 11 nt, Artificial Sequence
  Description of Artificial Sequence: Synthetic oligonucleotide
cugagaaagcu

SEQ ID NO: 150636 - RNA, 13 nt, Artificial Sequence
  Description of Artificial Sequence: Synthetic oligonucleotide
aguaaagaugcua

SEQ ID NO: 150637 - RNA, 12 nt, Artificial Sequence
  Description of Artificial Sequence: Synthetic oligonucleotide
cugcuuaauugc

SEQ ID NO: 150638 - RNA, 14 nt, Artificial Sequence
  Description of Artificial Sequence: Synthetic oligonucleotide
uaccauaugaauga

SEQ ID NO: 150639 - RNA, 12 nt, Artificial Sequence
  Description of Artificial Sequence: Synthetic oligonucleotide
aacuuucuuauc

SEQ ID NO: 150640 - RNA, 13 nt, Artificial Sequence
  Description of Artificial Sequence: Synthetic oligonucleotide
ccuugcaugacau

SEQ ID NO: 150641 - RNA, 14 nt, Artificial Sequence
  Description of Artificial Sequence: Synthetic oligonucleotide
ugaauuuguauaug

SEQ ID NO: 150642 - RNA, 12 nt, Artificial Sequence
  Description of Artificial Sequence: Synthetic oligonucleotide
gaauccuaguag

SEQ ID NO: 150643 - RNA, 10 nt, Artificial Sequence
  Description of Artificial Sequence: Synthetic oligonucleotide
gaaagggaag

SEQ ID NO: 150644 - RNA, 11 nt, Artificial Sequence
  Description of Artificial Sequence: Synthetic oligonucleotide
uaucggcaugc

SEQ ID NO: 150645 - RNA, 12 nt, Artificial Sequence
  Description of Artificial Sequence: Synthetic oligonucleotide
caccucauagua

SEQ ID NO: 150646 - RNA, 11 nt, Artificial Sequence
  Description of Artificial Sequence: Synthetic oligonucleotide
ccagaauugcc

SEQ ID NO: 150647 - RNA, 11 nt, Artificial Sequence
  Description of Artificial Sequence: Synthetic oligonucleotide
uggugaucugg

SEQ ID NO: 150648 - RNA, 12 nt, Artificial Sequence
  Description of Artificial Sequence: Synthetic oligonucleotide
gaucuggguaau

SEQ ID NO: 150649 - RNA, 12 nt, Artificial Sequence
  Description of Artificial Sequence: Synthetic oligonucleotide
ggaugugaugaa

SEQ ID NO: 150650 - RNA, 12 nt, Artificial Sequence
  Description of Artificial Sequence: Synthetic oligonucleotide
cauuuccacagc

SEQ ID NO: 150651 - RNA, 11 nt, Artificial Sequence
  Description of Artificial Sequence: Synthetic oligonucleotide
acagcuacacc

SEQ ID NO: 150652 - RNA, 12 nt, Artificial Sequence
  Description of Artificial Sequence: Synthetic oligonucleotide
ugcaguucuuac

SEQ ID NO: 150653 - RNA, 12 nt, Artificial Sequence
  Description of Artificial Sequence: Synthetic oligonucleotide
acgagaagaaga

SEQ ID NO: 150654 - RNA, 12 nt, Artificial Sequence
  Description of Artificial Sequence: Synthetic oligonucleotide
cgagaagaagau

SEQ ID NO: 150655 - RNA, 15 nt, Artificial Sequence
  Description of Artificial Sequence: Synthetic oligonucleotide
aagaagaucauuuac

SEQ ID NO: 150656 - RNA, 11 nt, Artificial Sequence
  Description of Artificial Sequence: Synthetic oligonucleotide
agaggaagagg

SEQ ID NO: 150657 - RNA, 12 nt, Artificial Sequence
  Description of Artificial Sequence: Synthetic oligonucleotide
gaggaagaggug

SEQ ID NO: 150658 - RNA, 13 nt, Artificial Sequence
  Description of Artificial Sequence: Synthetic oligonucleotide
cuacuuugagggc

SEQ ID NO: 150659 - RNA, 12 nt, Artificial Sequence
  Description of Artificial Sequence: Synthetic oligonucleotide
agggcaucuccu

SEQ ID NO: 150660 - RNA, 10 nt, Artificial Sequence
  Description of Artificial Sequence: Synthetic oligonucleotide
ggagugauau

SEQ ID NO: 150661 - RNA, 11 nt, Artificial Sequence
  Description of Artificial Sequence: Synthetic oligonucleotide
gagugauaugg

SEQ ID NO: 150662 - RNA, 12 nt, Artificial Sequence
  Description of Artificial Sequence: Synthetic oligonucleotide
ugcaguaaagau

SEQ ID NO: 150663 - RNA, 13 nt, Artificial Sequence
  Description of Artificial Sequence: Synthetic oligonucleotide
aguaaagauccua

SEQ ID NO: 150664 - RNA, 12 nt, Artificial Sequence
  Description of Artificial Sequence: Synthetic oligonucleotide
ugacaaaggaca

SEQ ID NO: 150665 - RNA, 13 nt, Artificial Sequence
  Description of Artificial Sequence: Synthetic oligonucleotide
gcaauugugaccc

SEQ ID NO: 150666 - RNA, 12 nt, Artificial Sequence
  Description of Artificial Sequence: Synthetic oligonucleotide
aacaucauccau

SEQ ID NO: 150667 - RNA, 12 nt, Artificial Sequence
  Description of Artificial Sequence: Synthetic oligonucleotide
ugaaauccaaca

SEQ ID NO: 150668 - RNA, 15 nt, Artificial Sequence
  Description of Artificial Sequence: Synthetic oligonucleotide
aacaauauauuucuc

SEQ ID NO: 150669 - RNA, 14 nt, Artificial Sequence
  Description of Artificial Sequence: Synthetic oligonucleotide
aacaguaaagucac

SEQ ID NO: 150670 - RNA, 14 nt, Artificial Sequence
  Description of Artificial Sequence: Synthetic oligonucleotide
ugugaagaaaguaa

SEQ ID NO: 150671 - RNA, 13 nt, Artificial Sequence
  Description of Artificial Sequence: Synthetic oligonucleotide
cuuccgagccauc

SEQ ID NO: 150672 - RNA, 12 nt, Artificial Sequence
  Description of Artificial Sequence: Synthetic oligonucleotide
aauggagguuga

SEQ ID NO: 150673 - RNA, 12 nt, Artificial Sequence
  Description of Artificial Sequence: Synthetic oligonucleotide
ggagguugaaua

SEQ ID NO: 150674 - RNA, 13 nt, Artificial Sequence
  Description of Artificial Sequence: Synthetic oligonucleotide
auuuugaguuuuc

SEQ ID NO: 150675 - RNA, 12 nt, Artificial Sequence
  Description of Artificial Sequence: Synthetic oligonucleotide
uauccuguuugu

SEQ ID NO: 150676 - RNA, 11 nt, Artificial Sequence
  Description of Artificial Sequence: Synthetic oligonucleotide
ccuguuuguuc

SEQ ID NO: 150677 - RNA, 10 nt, Artificial Sequence
  Description of Artificial Sequence: Synthetic oligonucleotide
cucuacagcc

SEQ ID NO: 150678 - RNA, 12 nt, Artificial Sequence
  Description of Artificial Sequence: Synthetic oligonucleotide
ucuuccauagcu

SEQ ID NO: 150679 - RNA, 12 nt, Artificial Sequence
  Description of Artificial Sequence: Synthetic oligonucleotide
auaaucuuccug

SEQ ID NO: 150680 - RNA, 12 nt, Artificial Sequence
  Description of Artificial Sequence: Synthetic oligonucleotide
uaaucuuccugu

SEQ ID NO: 150681 - RNA, 12 nt, Artificial Sequence
  Description of Artificial Sequence: Synthetic oligonucleotide
cuucaugacuug

SEQ ID NO: 150682 - RNA, 12 nt, Artificial Sequence
  Description of Artificial Sequence: Synthetic oligonucleotide
aagagggagaga

SEQ ID NO: 150683 - RNA, 12 nt, Artificial Sequence
  Description of Artificial Sequence: Synthetic oligonucleotide
cgucuccuacca

SEQ ID NO: 150684 - RNA, 12 nt, Artificial Sequence
  Description of Artificial Sequence: Synthetic oligonucleotide
gaucaaucggcc

SEQ ID NO: 150685 - RNA, 12 nt, Artificial Sequence
  Description of Artificial Sequence: Synthetic oligonucleotide
ggacgaacaucc

SEQ ID NO: 150686 - RNA, 11 nt, Artificial Sequence
  Description of Artificial Sequence: Synthetic oligonucleotide
agggucggaac

SEQ ID NO: 150687 - RNA, 10 nt, Artificial Sequence
  Description of Artificial Sequence: Synthetic oligonucleotide
ucggaaccca

SEQ ID NO: 150688 - RNA, 11 nt, Artificial Sequence
  Description of Artificial Sequence: Synthetic oligonucleotide
acccaagcuua

SEQ ID NO: 150689 - RNA, 14 nt, Artificial Sequence
  Description of Artificial Sequence: Synthetic oligonucleotide
gaacuuuaagcaac

SEQ ID NO: 150690 - RNA, 11 nt, Artificial Sequence
  Description of Artificial Sequence: Synthetic oligonucleotide
acuauucagug

SEQ ID NO: 150691 - RNA, 11 nt, Artificial Sequence
  Description of Artificial Sequence: Synthetic oligonucleotide
cuauucagugg

SEQ ID NO: 150692 - RNA, 13 nt, Artificial Sequence
  Description of Artificial Sequence: Synthetic oligonucleotide
aaacacagauaac

SEQ ID NO: 150693 - RNA, 12 nt, Artificial Sequence
  Description of Artificial Sequence: Synthetic oligonucleotide
cuuaagaaaaga

SEQ ID NO: 150694 - RNA, 12 nt, Artificial Sequence
  Description of Artificial Sequence: Synthetic oligonucleotide
cugaaggagugu

SEQ ID NO: 150695 - RNA, 10 nt, Artificial Sequence
  Description of Artificial Sequence: Synthetic oligonucleotide
ucaccgcggg

SEQ ID NO: 150696 - RNA, 14 nt, Artificial Sequence
  Description of Artificial Sequence: Synthetic oligonucleotide
agcagaaauaagcg

SEQ ID NO: 150697 - RNA, 12 nt, Artificial Sequence
  Description of Artificial Sequence: Synthetic oligonucleotide
aagcgugccguu

SEQ ID NO: 150698 - RNA, 12 nt, Artificial Sequence
  Description of Artificial Sequence: Synthetic oligonucleotide
agaaacagucac

SEQ ID NO: 150699 - RNA, 12 nt, Artificial Sequence
  Description of Artificial Sequence: Synthetic oligonucleotide
agaggaagaagg

SEQ ID NO: 150700 - RNA, 14 nt, Artificial Sequence
  Description of Artificial Sequence: Synthetic oligonucleotide
uguauucaaaauau

SEQ ID NO: 150701 - RNA, 13 nt, Artificial Sequence
  Description of Artificial Sequence: Synthetic oligonucleotide
auuuuccucccuu

SEQ ID NO: 150702 - RNA, 13 nt, Artificial Sequence
  Description of Artificial Sequence: Synthetic oligonucleotide
caaagaaagauag

SEQ ID NO: 150703 - RNA, 12 nt, Artificial Sequence
  Description of Artificial Sequence: Synthetic oligonucleotide
aagaaagauaga

SEQ ID NO: 150704 - RNA, 13 nt, Artificial Sequence
  Description of Artificial Sequence: Synthetic oligonucleotide
gaaagcauuuguu

SEQ ID NO: 150705 - RNA, 13 nt, Artificial Sequence
  Description of Artificial Sequence: Synthetic oligonucleotide
ugaguuaaacgaa

SEQ ID NO: 150706 - RNA, 12 nt, Artificial Sequence
  Description of Artificial Sequence: Synthetic oligonucleotide
acugauacagaa

SEQ ID NO: 150707 - RNA, 12 nt, Artificial Sequence
  Description of Artificial Sequence: Synthetic oligonucleotide
auauuauauaua

SEQ ID NO: 150708 - RNA, 12 nt, Artificial Sequence
  Description of Artificial Sequence: Synthetic oligonucleotide
auuauauauaua

SEQ ID NO: 150709 - RNA, 12 nt, Artificial Sequence
  Description of Artificial Sequence: Synthetic oligonucleotide
ucacuggaugua

SEQ ID NO: 150710 - RNA, 12 nt, Artificial Sequence
  Description of Artificial Sequence: Synthetic oligonucleotide
cagggaagagga

SEQ ID NO: 150711 - RNA, 15 nt, Artificial Sequence
  Description of Artificial Sequence: Synthetic oligonucleotide
augaucuuuuuuuug

SEQ ID NO: 150712 - RNA, 11 nt, Artificial Sequence
  Description of Artificial Sequence: Synthetic oligonucleotide
aguucacggcc

SEQ ID NO: 150713 - RNA, 13 nt, Artificial Sequence
  Description of Artificial Sequence: Synthetic oligonucleotide
caccaucacacca

SEQ ID NO: 150714 - RNA, 11 nt, Artificial Sequence
  Description of Artificial Sequence: Synthetic oligonucleotide
ccugcggguuu

SEQ ID NO: 150715 - RNA, 10 nt, Artificial Sequence
  Description of Artificial Sequence: Synthetic oligonucleotide
auccaguuug

SEQ ID NO: 150716 - RNA, 13 nt, Artificial Sequence
  Description of Artificial Sequence: Synthetic oligonucleotide
guuaaggacuucu

SEQ ID NO: 150717 - RNA, 13 nt, Artificial Sequence
  Description of Artificial Sequence: Synthetic oligonucleotide
cagugggacagag

SEQ ID NO: 150718 - RNA, 14 nt, Artificial Sequence
  Description of Artificial Sequence: Synthetic oligonucleotide
aauuuguuauugug

SEQ ID NO: 150719 - RNA, 13 nt, Artificial Sequence
  Description of Artificial Sequence: Synthetic oligonucleotide
uucaaaugcauuu

SEQ ID NO: 150720 - RNA, 10 nt, Artificial Sequence
  Description of Artificial Sequence: Synthetic oligonucleotide
caggaaagcc

SEQ ID NO: 150721 - RNA, 11 nt, Artificial Sequence
  Description of Artificial Sequence: Synthetic oligonucleotide
aggaaagcccu

SEQ ID NO: 150722 - RNA, 12 nt, Artificial Sequence
  Description of Artificial Sequence: Synthetic oligonucleotide
cccagcauggcc

SEQ ID NO: 150723 - RNA, 11 nt, Artificial Sequence
  Description of Artificial Sequence: Synthetic oligonucleotide
cuucucccuga

SEQ ID NO: 150724 - RNA, 12 nt, Artificial Sequence
  Description of Artificial Sequence: Synthetic oligonucleotide
gaagaagcccuu

SEQ ID NO: 150725 - RNA, 12 nt, Artificial Sequence
  Description of Artificial Sequence: Synthetic oligonucleotide
agaagcccuuca

SEQ ID NO: 150726 - RNA, 11 nt, Artificial Sequence
  Description of Artificial Sequence: Synthetic oligonucleotide
gcccuucagcg

SEQ ID NO: 150727 - RNA, 11 nt, Artificial Sequence
  Description of Artificial Sequence: Synthetic oligonucleotide
ccuucagcggc

SEQ ID NO: 150728 - RNA, 12 nt, Artificial Sequence
  Description of Artificial Sequence: Synthetic oligonucleotide
ucagcggccagu

SEQ ID NO: 150729 - RNA, 12 nt, Artificial Sequence
  Description of Artificial Sequence: Synthetic oligonucleotide
ugaaaagcuccg

SEQ ID NO: 150730 - RNA, 11 nt, Artificial Sequence
  Description of Artificial Sequence: Synthetic oligonucleotide
aaaagcuccgg

SEQ ID NO: 150731 - RNA, 13 nt, Artificial Sequence
  Description of Artificial Sequence: Synthetic oligonucleotide
agucaacagucug

SEQ ID NO: 150732 - RNA, 13 nt, Artificial Sequence
  Description of Artificial Sequence: Synthetic oligonucleotide
cagaguucaaaag

SEQ ID NO: 150733 - RNA, 13 nt, Artificial Sequence
  Description of Artificial Sequence: Synthetic oligonucleotide
agaguucaaaagc

SEQ ID NO: 150734 - RNA, 12 nt, Artificial Sequence
  Description of Artificial Sequence: Synthetic oligonucleotide
uucaaaagcccu

SEQ ID NO: 150735 - RNA, 12 nt, Artificial Sequence
  Description of Artificial Sequence: Synthetic oligonucleotide
ucaaaagcccuu

SEQ ID NO: 150736 - RNA, 12 nt, Artificial Sequence
  Description of Artificial Sequence: Synthetic oligonucleotide
aaaagcccuuca

SEQ ID NO: 150737 - RNA, 12 nt, Artificial Sequence
  Description of Artificial Sequence: Synthetic oligonucleotide
aaagcccuucag

SEQ ID NO: 150738 - RNA, 13 nt, Artificial Sequence
  Description of Artificial Sequence: Synthetic oligonucleotide
gugaagccgcucg

SEQ ID NO: 150739 - RNA, 12 nt, Artificial Sequence
  Description of Artificial Sequence: Synthetic oligonucleotide
cacgccagucaa

SEQ ID NO: 150740 - RNA, 13 nt, Artificial Sequence
  Description of Artificial Sequence: Synthetic oligonucleotide
uucuuggugcgug

SEQ ID NO: 150741 - RNA, 14 nt, Artificial Sequence
  Description of Artificial Sequence: Synthetic oligonucleotide
auuggauucaucag

SEQ ID NO: 150742 - RNA, 13 nt, Artificial Sequence
  Description of Artificial Sequence: Synthetic oligonucleotide
uggaauaccuaag

SEQ ID NO: 150743 - RNA, 12 nt, Artificial Sequence
  Description of Artificial Sequence: Synthetic oligonucleotide
auuugaggcuca

SEQ ID NO: 150744 - RNA, 11 nt, Artificial Sequence
  Description of Artificial Sequence: Synthetic oligonucleotide
ucuacaauugg

SEQ ID NO: 150745 - RNA, 12 nt, Artificial Sequence
  Description of Artificial Sequence: Synthetic oligonucleotide
uaguuaggagcc

SEQ ID NO: 150746 - RNA, 13 nt, Artificial Sequence
  Description of Artificial Sequence: Synthetic oligonucleotide
agucaauauccac

SEQ ID NO: 150747 - RNA, 13 nt, Artificial Sequence
  Description of Artificial Sequence: Synthetic oligonucleotide
auguucagucaca

SEQ ID NO: 150748 - RNA, 12 nt, Artificial Sequence
  Description of Artificial Sequence: Synthetic oligonucleotide
acacacacauac

SEQ ID NO: 150749 - RNA, 12 nt, Artificial Sequence
  Description of Artificial Sequence: Synthetic oligonucleotide
uuccuuuugcuu

SEQ ID NO: 150750 - RNA, 16 nt, Artificial Sequence
  Description of Artificial Sequence: Synthetic oligonucleotide
uuuuaaaguaauuuuu

SEQ ID NO: 150751 - RNA, 13 nt, Artificial Sequence
  Description of Artificial Sequence: Synthetic oligonucleotide
caacagucaaugg

SEQ ID NO: 150752 - RNA, 13 nt, Artificial Sequence
  Description of Artificial Sequence: Synthetic oligonucleotide
ucgacaaaccaau

SEQ ID NO: 150753 - RNA, 12 nt, Artificial Sequence
  Description of Artificial Sequence: Synthetic oligonucleotide
acugcuaccacu

SEQ ID NO: 150754 - RNA, 13 nt, Artificial Sequence
  Description of Artificial Sequence: Synthetic oligonucleotide
gcaagcggucuua

SEQ ID NO: 150755 - RNA, 13 nt, Artificial Sequence
  Description of Artificial Sequence: Synthetic oligonucleotide
ggucuuaccggcu

SEQ ID NO: 150756 - RNA, 11 nt, Artificial Sequence
  Description of Artificial Sequence: Synthetic oligonucleotide
gauggguuacc

SEQ ID NO: 150757 - RNA, 11 nt, Artificial Sequence
  Description of Artificial Sequence: Synthetic oligonucleotide
guuaccugcga

SEQ ID NO: 150758 - RNA, 12 nt, Artificial Sequence
  Description of Artificial Sequence: Synthetic oligonucleotide
aaucuugcugag

SEQ ID NO: 150759 - RNA, 13 nt, Artificial Sequence
  Description of Artificial Sequence: Synthetic oligonucleotide
agcauaaaacagu

SEQ ID NO: 150760 - RNA, 12 nt, Artificial Sequence
  Description of Artificial Sequence: Synthetic oligonucleotide
guccuuuauccu

SEQ ID NO: 150761 - RNA, 12 nt, Artificial Sequence
  Description of Artificial Sequence: Synthetic oligonucleotide
caacgcaaguug

SEQ ID NO: 150762 - RNA, 13 nt, Artificial Sequence
  Description of Artificial Sequence: Synthetic oligonucleotide
aaacugaaaccau

SEQ ID NO: 150763 - RNA, 14 nt, Artificial Sequence
  Description of Artificial Sequence: Synthetic oligonucleotide
acuuuguuaaauau

SEQ ID NO: 150764 - RNA, 14 nt, Artificial Sequence
  Description of Artificial Sequence: Synthetic oligonucleotide
guauauuaaaaguu

SEQ ID NO: 150765 - RNA, 13 nt, Artificial Sequence
  Description of Artificial Sequence: Synthetic oligonucleotide
guuuugacuuaac

SEQ ID NO: 150766 - RNA, 13 nt, Artificial Sequence
  Description of Artificial Sequence: Synthetic oligonucleotide
gcaaacucagcac

SEQ ID NO: 150767 - RNA, 11 nt, Artificial Sequence
  Description of Artificial Sequence: Synthetic oligonucleotide
ugcugaccuca

SEQ ID NO: 150768 - RNA, 14 nt, Artificial Sequence
  Description of Artificial Sequence: Synthetic oligonucleotide
uuuauucagaucgc

SEQ ID NO: 150769 - RNA, 13 nt, Artificial Sequence
  Description of Artificial Sequence: Synthetic oligonucleotide
aggguucugggau

SEQ ID NO: 150770 - RNA, 15 nt, Artificial Sequence
  Description of Artificial Sequence: Synthetic oligonucleotide
auauuggaaauuaug

SEQ ID NO: 150771 - RNA, 13 nt, Artificial Sequence
  Description of Artificial Sequence: Synthetic oligonucleotide
auggaagcacuag

SEQ ID NO: 150772 - RNA, 13 nt, Artificial Sequence
  Description of Artificial Sequence: Synthetic oligonucleotide
guuuuuaugugga

SEQ ID NO: 150773 - RNA, 12 nt, Artificial Sequence
  Description of Artificial Sequence: Synthetic oligonucleotide
ggaauugguaga

SEQ ID NO: 150774 - RNA, 13 nt, Artificial Sequence
  Description of Artificial Sequence: Synthetic oligonucleotide
uuagacuuggaga

SEQ ID NO: 150775 - RNA, 13 nt, Artificial Sequence
  Description of Artificial Sequence: Synthetic oligonucleotide
uuacaguauucca

SEQ ID NO: 150776 - RNA, 15 nt, Artificial Sequence
  Description of Artificial Sequence: Synthetic oligonucleotide
ccacugaugaauuaa

SEQ ID NO: 150777 - RNA, 12 nt, Artificial Sequence
  Description of Artificial Sequence: Synthetic oligonucleotide
ccacaucaucac

SEQ ID NO: 150778 - RNA, 13 nt, Artificial Sequence
  Description of Artificial Sequence: Synthetic oligonucleotide
cucaccaaacaga

SEQ ID NO: 150779 - RNA, 12 nt, Artificial Sequence
  Description of Artificial Sequence: Synthetic oligonucleotide
ggaacaugaugg

SEQ ID NO: 150780 - RNA, 12 nt, Artificial Sequence
  Description of Artificial Sequence: Synthetic oligonucleotide
cauguagacugc

SEQ ID NO: 150781 - RNA, 13 nt, Artificial Sequence
  Description of Artificial Sequence: Synthetic oligonucleotide
ggaucuauuuaug

SEQ ID NO: 150782 - RNA, 12 nt, Artificial Sequence
  Description of Artificial Sequence: Synthetic oligonucleotide
gcacuauuauca

SEQ ID NO: 150783 - RNA, 11 nt, Artificial Sequence
  Description of Artificial Sequence: Synthetic oligonucleotide
aucaguucugc

SEQ ID NO: 150784 - RNA, 13 nt, Artificial Sequence
  Description of Artificial Sequence: Synthetic oligonucleotide
agauuaaaccuac

SEQ ID NO: 150785 - RNA, 13 nt, Artificial Sequence
  Description of Artificial Sequence: Synthetic oligonucleotide
auaaaauccuucu

SEQ ID NO: 150786 - RNA, 12 nt, Artificial Sequence
  Description of Artificial Sequence: Synthetic oligonucleotide
aaugcuguagac

SEQ ID NO: 150787 - RNA, 13 nt, Artificial Sequence
  Description of Artificial Sequence: Synthetic oligonucleotide
uugauaggaauag

SEQ ID NO: 150788 - RNA, 11 nt, Artificial Sequence
  Description of Artificial Sequence: Synthetic oligonucleotide
aauggcccuga

SEQ ID NO: 150789 - RNA, 11 nt, Artificial Sequence
  Description of Artificial Sequence: Synthetic oligonucleotide
uuccucaagca

SEQ ID NO: 150790 - RNA, 10 nt, Artificial Sequence
  Description of Artificial Sequence: Synthetic oligonucleotide
guucagccca

SEQ ID NO: 150791 - RNA, 11 nt, Artificial Sequence
  Description of Artificial Sequence: Synthetic oligonucleotide
gcugcugaacc

SEQ ID NO: 150792 - RNA, 12 nt, Artificial Sequence
  Description of Artificial Sequence: Synthetic oligonucleotide
aaguucucuuca

SEQ ID NO: 150793 - RNA, 11 nt, Artificial Sequence
  Description of Artificial Sequence: Synthetic oligonucleotide
ccagccuagag

SEQ ID NO: 150794 - RNA, 13 nt, Artificial Sequence
  Description of Artificial Sequence: Synthetic oligonucleotide
cucugugaagugu

SEQ ID NO: 150795 - RNA, 14 nt, Artificial Sequence
  Description of Artificial Sequence: Synthetic oligonucleotide
ugagaaaauuucaa

SEQ ID NO: 150796 - RNA, 11 nt, Artificial Sequence
  Description of Artificial Sequence: Synthetic oligonucleotide
aauccuccuga

SEQ ID NO: 150797 - RNA, 12 nt, Artificial Sequence
  Description of Artificial Sequence: Synthetic oligonucleotide
gugacaucauau

SEQ ID NO: 150798 - RNA, 13 nt, Artificial Sequence
  Description of Artificial Sequence: Synthetic oligonucleotide
aaucuucaucaua

SEQ ID NO: 150799 - RNA, 13 nt, Artificial Sequence
  Description of Artificial Sequence: Synthetic oligonucleotide
gacuagcuauuaa

SEQ ID NO: 150800 - RNA, 14 nt, Artificial Sequence
  Description of Artificial Sequence: Synthetic oligonucleotide
ucucuacuaaaaau

SEQ ID NO: 150801 - RNA, 12 nt, Artificial Sequence
  Description of Artificial Sequence: Synthetic oligonucleotide
ucuaucucgccu

SEQ ID NO: 150802 - RNA, 13 nt, Artificial Sequence
  Description of Artificial Sequence: Synthetic oligonucleotide
cuucgguccaguu

SEQ ID NO: 150803 - RNA, 11 nt, Artificial Sequence
  Description of Artificial Sequence: Synthetic oligonucleotide
gauguagccgc

SEQ ID NO: 150804 - RNA, 12 nt, Artificial Sequence
  Description of Artificial Sequence: Synthetic oligonucleotide
ugaggagacuug

SEQ ID NO: 150805 - RNA, 12 nt, Artificial Sequence
  Description of Artificial Sequence: Synthetic oligonucleotide
gaguagugagga

SEQ ID NO: 150806 - RNA, 14 nt, Artificial Sequence
  Description of Artificial Sequence: Synthetic oligonucleotide
cagaugaguacaaa

SEQ ID NO: 150807 - RNA, 13 nt, Artificial Sequence
  Description of Artificial Sequence: Synthetic oligonucleotide
guuguuaaugggc

SEQ ID NO: 150808 - RNA, 13 nt, Artificial Sequence
  Description of Artificial Sequence: Synthetic oligonucleotide
uuuuuaauuuauu

SEQ ID NO: 150809 - RNA, 12 nt, Artificial Sequence
  Description of Artificial Sequence: Synthetic oligonucleotide
uauuuaaauaug

SEQ ID NO: 150810 - RNA, 13 nt, Artificial Sequence
  Description of Artificial Sequence: Synthetic oligonucleotide
uauccuuuguuuc

SEQ ID NO: 150811 - RNA, 14 nt, Artificial Sequence
  Description of Artificial Sequence: Synthetic oligonucleotide
cgucuaaguguuug

SEQ ID NO: 150812 - RNA, 12 nt, Artificial Sequence
  Description of Artificial Sequence: Synthetic oligonucleotide
accugugacaaa

SEQ ID NO: 150813 - RNA, 13 nt, Artificial Sequence
  Description of Artificial Sequence: Synthetic oligonucleotide
ccaggcugaauua

SEQ ID NO: 150814 - RNA, 14 nt, Artificial Sequence
  Description of Artificial Sequence: Synthetic oligonucleotide
gucauucuuacaau

SEQ ID NO: 150815 - RNA, 15 nt, Artificial Sequence
  Description of Artificial Sequence: Synthetic oligonucleotide
ucauucuuacaauug

SEQ ID NO: 150816 - RNA, 12 nt, Artificial Sequence
  Description of Artificial Sequence: Synthetic oligonucleotide
cagagaguguac

SEQ ID NO: 150817 - RNA, 12 nt, Artificial Sequence
  Description of Artificial Sequence: Synthetic oligonucleotide
agaacucagcag

SEQ ID NO: 150818 - RNA, 13 nt, Artificial Sequence
  Description of Artificial Sequence: Synthetic oligonucleotide
uuuauuuucagua

SEQ ID NO: 150819 - RNA, 12 nt, Artificial Sequence
  Description of Artificial Sequence: Synthetic oligonucleotide
ucuuaaauggaa

SEQ ID NO: 150820 - RNA, 13 nt, Artificial Sequence
  Description of Artificial Sequence: Synthetic oligonucleotide
ugccuaaaauugu

SEQ ID NO: 150821 - RNA, 12 nt, Artificial Sequence
  Description of Artificial Sequence: Synthetic oligonucleotide
agacugugagcu

SEQ ID NO: 150822 - RNA, 14 nt, Artificial Sequence
  Description of Artificial Sequence: Synthetic oligonucleotide
ugcuuuuuauuaau

SEQ ID NO: 150823 - RNA, 13 nt, Artificial Sequence
  Description of Artificial Sequence: Synthetic oligonucleotide
cucuucuuacauu

SEQ ID NO: 150824 - RNA, 15 nt, Artificial Sequence
  Description of Artificial Sequence: Synthetic oligonucleotide
cauuuguaaaaaugu

SEQ ID NO: 150825 - RNA, 15 nt, Artificial Sequence
  Description of Artificial Sequence: Synthetic oligonucleotide
aucuuaauucauauu

SEQ ID NO: 150826 - RNA, 13 nt, Artificial Sequence
  Description of Artificial Sequence: Synthetic oligonucleotide
gaacuaaucauga

SEQ ID NO: 150827 - RNA, 12 nt, Artificial Sequence
  Description of Artificial Sequence: Synthetic oligonucleotide
ucugcucuuggg

SEQ ID NO: 150828 - RNA, 13 nt, Artificial Sequence
  Description of Artificial Sequence: Synthetic oligonucleotide
caguagcuuugag

SEQ ID NO: 150829 - RNA, 14 nt, Artificial Sequence
  Description of Artificial Sequence: Synthetic oligonucleotide
cacguaauauuuca

SEQ ID NO: 150830 - RNA, 13 nt, Artificial Sequence
  Description of Artificial Sequence: Synthetic oligonucleotide
uauucucuucacu

SEQ ID NO: 150831 - RNA, 14 nt, Artificial Sequence
  Description of Artificial Sequence: Synthetic oligonucleotide
cuaaugcuaagaaa

SEQ ID NO: 150832 - RNA, 12 nt, Artificial Sequence
  Description of Artificial Sequence: Synthetic oligonucleotide
gcugaaaaucaa

SEQ ID NO: 150833 - RNA, 14 nt, Artificial Sequence
  Description of Artificial Sequence: Synthetic oligonucleotide
aauaugauuacuuu

SEQ ID NO: 150834 - RNA, 14 nt, Artificial Sequence
  Description of Artificial Sequence: Synthetic oligonucleotide
cauuuuguucuaca

SEQ ID NO: 150835 - RNA, 12 nt, Artificial Sequence
  Description of Artificial Sequence: Synthetic oligonucleotide
cccgggacucuc

SEQ ID NO: 150836 - RNA, 14 nt, Artificial Sequence
  Description of Artificial Sequence: Synthetic oligonucleotide
ccuuuaaaguaaag

SEQ ID NO: 150837 - RNA, 13 nt, Artificial Sequence
  Description of Artificial Sequence: Synthetic oligonucleotide
ucuggaagccugg

SEQ ID NO: 150838 - RNA, 14 nt, Artificial Sequence
  Description of Artificial Sequence: Synthetic oligonucleotide
aaaacaaaagagag

SEQ ID NO: 150839 - RNA, 13 nt, Artificial Sequence
  Description of Artificial Sequence: Synthetic oligonucleotide
aucaguuaugccg

SEQ ID NO: 150840 - RNA, 13 nt, Artificial Sequence
  Description of Artificial Sequence: Synthetic oligonucleotide
uaaaagaagucca

SEQ ID NO: 150841 - RNA, 11 nt, Artificial Sequence
  Description of Artificial Sequence: Synthetic oligonucleotide
aggugagguua

SEQ ID NO: 150842 - RNA, 11 nt, Artificial Sequence
  Description of Artificial Sequence: Synthetic oligonucleotide
gggaagaggac

SEQ ID NO: 150843 - RNA, 13 nt, Artificial Sequence
  Description of Artificial Sequence: Synthetic oligonucleotide
aagcaaguauugu

SEQ ID NO: 150844 - RNA, 12 nt, Artificial Sequence
  Description of Artificial Sequence: Synthetic oligonucleotide
auuguagcacuc

SEQ ID NO: 150845 - RNA, 14 nt, Artificial Sequence
  Description of Artificial Sequence: Synthetic oligonucleotide
acaaaaccacaaau

SEQ ID NO: 150846 - RNA, 12 nt, Artificial Sequence
  Description of Artificial Sequence: Synthetic oligonucleotide
uaagcccauaca

SEQ ID NO: 150847 - RNA, 11 nt, Artificial Sequence
  Description of Artificial Sequence: Synthetic oligonucleotide
agcccauacag

SEQ ID NO: 150848 - RNA, 12 nt, Artificial Sequence
  Description of Artificial Sequence: Synthetic oligonucleotide
cagaaaccuucc

SEQ ID NO: 150849 - RNA, 10 nt, Artificial Sequence
  Description of Artificial Sequence: Synthetic oligonucleotide
guauaccuac

SEQ ID NO: 150850 - RNA, 13 nt, Artificial Sequence
  Description of Artificial Sequence: Synthetic oligonucleotide
gccaguuuucgga

SEQ ID NO: 150851 - RNA, 9 nt, Artificial Sequence
  Description of Artificial Sequence: Synthetic oligonucleotide
ggaacaggg

SEQ ID NO: 150852 - RNA, 13 nt, Artificial Sequence
  Description of Artificial Sequence: Synthetic oligonucleotide
uuaacuuuccagu

SEQ ID NO: 150853 - RNA, 14 nt, Artificial Sequence
  Description of Artificial Sequence: Synthetic oligonucleotide
aaaguuugguuuug

SEQ ID NO: 150854 - RNA, 12 nt, Artificial Sequence
  Description of Artificial Sequence: Synthetic oligonucleotide
cuucccacugua

SEQ ID NO: 150855 - RNA, 13 nt, Artificial Sequence
  Description of Artificial Sequence: Synthetic oligonucleotide
ugauaccauauga

SEQ ID NO: 150856 - RNA, 11 nt, Artificial Sequence
  Description of Artificial Sequence: Synthetic oligonucleotide
aacaugggcug

SEQ ID NO: 150857 - RNA, 13 nt, Artificial Sequence
  Description of Artificial Sequence: Synthetic oligonucleotide
caacuuuuucaua

SEQ ID NO: 150858 - RNA, 12 nt, Artificial Sequence
  Description of Artificial Sequence: Synthetic oligonucleotide
caugaggccgga

SEQ ID NO: 150859 - RNA, 11 nt, Artificial Sequence
  Description of Artificial Sequence: Synthetic oligonucleotide
acugcauuugu

SEQ ID NO: 150860 - RNA, 13 nt, Artificial Sequence
  Description of Artificial Sequence: Synthetic oligonucleotide
aauguuuacuacc

SEQ ID NO: 150861 - RNA, 15 nt, Artificial Sequence
  Description of Artificial Sequence: Synthetic oligonucleotide
aauuuuuugaugaaa

SEQ ID NO: 150862 - RNA, 14 nt, Artificial Sequence
  Description of Artificial Sequence: Synthetic oligonucleotide
cagugugugaauuu

SEQ ID NO: 150863 - RNA, 13 nt, Artificial Sequence
  Description of Artificial Sequence: Synthetic oligonucleotide
gagcaauguaugu

SEQ ID NO: 150864 - RNA, 14 nt, Artificial Sequence
  Description of Artificial Sequence: Synthetic oligonucleotide
aaagcacauauaua

SEQ ID NO: 150865 - RNA, 14 nt, Artificial Sequence
  Description of Artificial Sequence: Synthetic oligonucleotide
guaauaguuucucc

SEQ ID NO: 150866 - RNA, 13 nt, Artificial Sequence
  Description of Artificial Sequence: Synthetic oligonucleotide
aguuucuccaaau

SEQ ID NO: 150867 - RNA, 13 nt, Artificial Sequence
  Description of Artificial Sequence: Synthetic oligonucleotide
uacuuccuagaaa

SEQ ID NO: 150868 - RNA, 13 nt, Artificial Sequence
  Description of Artificial Sequence: Synthetic oligonucleotide
uacaccauauaug

SEQ ID NO: 150869 - RNA, 14 nt, Artificial Sequence
  Description of Artificial Sequence: Synthetic oligonucleotide
auauaugaauggag

SEQ ID NO: 150870 - RNA, 13 nt, Artificial Sequence
  Description of Artificial Sequence: Synthetic oligonucleotide
acgagaagaagau

SEQ ID NO: 150871 - RNA, 13 nt, Artificial Sequence
  Description of Artificial Sequence: Synthetic oligonucleotide
ucauuuacaggga

SEQ ID NO: 150872 - RNA, 13 nt, Artificial Sequence
  Description of Artificial Sequence: Synthetic oligonucleotide
cauuuacagggac

SEQ ID NO: 150873 - RNA, 10 nt, Artificial Sequence
  Description of Artificial Sequence: Synthetic oligonucleotide
agggaccuga

SEQ ID NO: 150874 - RNA, 14 nt, Artificial Sequence
  Description of Artificial Sequence: Synthetic oligonucleotide
uguuugacugcauc

SEQ ID NO: 150875 - RNA, 13 nt, Artificial Sequence
  Description of Artificial Sequence: Synthetic oligonucleotide
uuugacugcaucg

SEQ ID NO: 150876 - RNA, 12 nt, Artificial Sequence
  Description of Artificial Sequence: Synthetic oligonucleotide
gaguucacaggg

SEQ ID NO: 150877 - RNA, 13 nt, Artificial Sequence
  Description of Artificial Sequence: Synthetic oligonucleotide
ggcaccucugucc

SEQ ID NO: 150878 - RNA, 15 nt, Artificial Sequence
  Description of Artificial Sequence: Synthetic oligonucleotide
gguuugucuuuuuaa

SEQ ID NO: 150879 - RNA, 14 nt, Artificial Sequence
  Description of Artificial Sequence: Synthetic oligonucleotide
uuugucuuuuuaag

SEQ ID NO: 150880 - RNA, 13 nt, Artificial Sequence
  Description of Artificial Sequence: Synthetic oligonucleotide
ccuaaagguuguc

SEQ ID NO: 150881 - RNA, 12 nt, Artificial Sequence
  Description of Artificial Sequence: Synthetic oligonucleotide
aagguugucgac

SEQ ID NO: 150882 - RNA, 13 nt, Artificial Sequence
  Description of Artificial Sequence: Synthetic oligonucleotide
accuggcaauugu

SEQ ID NO: 150883 - RNA, 12 nt, Artificial Sequence
  Description of Artificial Sequence: Synthetic oligonucleotide
aguggugcgagg

SEQ ID NO: 150884 - RNA, 13 nt, Artificial Sequence
  Description of Artificial Sequence: Synthetic oligonucleotide
agagacaugaaau

SEQ ID NO: 150885 - RNA, 13 nt, Artificial Sequence
  Description of Artificial Sequence: Synthetic oligonucleotide
auauauuucucca

SEQ ID NO: 150886 - RNA, 10 nt, Artificial Sequence
  Description of Artificial Sequence: Synthetic oligonucleotide
caugaaggcu

SEQ ID NO: 150887 - RNA, 11 nt, Artificial Sequence
  Description of Artificial Sequence: Synthetic oligonucleotide
gcuggaguggu

SEQ ID NO: 150888 - RNA, 11 nt, Artificial Sequence
  Description of Artificial Sequence: Synthetic oligonucleotide
aggaagagagg

SEQ ID NO: 150889 - RNA, 12 nt, Artificial Sequence
  Description of Artificial Sequence: Synthetic oligonucleotide
cuugcaucgggc

SEQ ID NO: 150890 - RNA, 13 nt, Artificial Sequence
  Description of Artificial Sequence: Synthetic oligonucleotide
auauccuacugug

SEQ ID NO: 150891 - RNA, 13 nt, Artificial Sequence
  Description of Artificial Sequence: Synthetic oligonucleotide
uccuacuguguaa

SEQ ID NO: 150892 - RNA, 12 nt, Artificial Sequence
  Description of Artificial Sequence: Synthetic oligonucleotide
ccuuguagugua

SEQ ID NO: 150893 - RNA, 13 nt, Artificial Sequence
  Description of Artificial Sequence: Synthetic oligonucleotide
ucuuuguugauug

SEQ ID NO: 150894 - RNA, 14 nt, Artificial Sequence
  Description of Artificial Sequence: Synthetic oligonucleotide
uuuguugauugaaa

SEQ ID NO: 150895 - RNA, 15 nt, Artificial Sequence
  Description of Artificial Sequence: Synthetic oligonucleotide
uucuuuuucuuccau

SEQ ID NO: 150896 - RNA, 13 nt, Artificial Sequence
  Description of Artificial Sequence: Synthetic oligonucleotide
aaucuuccuucua

SEQ ID NO: 150897 - RNA, 13 nt, Artificial Sequence
  Description of Artificial Sequence: Synthetic oligonucleotide
uugaaugcuucau

SEQ ID NO: 150898 - RNA, 13 nt, Artificial Sequence
  Description of Artificial Sequence: Synthetic oligonucleotide
ugaaugcuucaug

SEQ ID NO: 150899 - RNA, 13 nt, Artificial Sequence
  Description of Artificial Sequence: Synthetic oligonucleotide
aauucuacuuuga

SEQ ID NO: 150900 - RNA, 13 nt, Artificial Sequence
  Description of Artificial Sequence: Synthetic oligonucleotide
agcaacuacagac

SEQ ID NO: 150901 - RNA, 13 nt, Artificial Sequence
  Description of Artificial Sequence: Synthetic oligonucleotide
gaccaaggucaac

SEQ ID NO: 150902 - RNA, 13 nt, Artificial Sequence
  Description of Artificial Sequence: Synthetic oligonucleotide
cgacuaucucgac

SEQ ID NO: 150903 - RNA, 13 nt, Artificial Sequence
  Description of Artificial Sequence: Synthetic oligonucleotide
aaccuucccaaac

SEQ ID NO: 150904 - RNA, 14 nt, Artificial Sequence
  Description of Artificial Sequence: Synthetic oligonucleotide
ccaagcuuagaacu

SEQ ID NO: 150905 - RNA, 15 nt, Artificial Sequence
  Description of Artificial Sequence: Synthetic oligonucleotide
agcuuagaacuuuaa

SEQ ID NO: 150906 - RNA, 11 nt, Artificial Sequence
  Description of Artificial Sequence: Synthetic oligonucleotide
aagaccaccac

SEQ ID NO: 150907 - RNA, 14 nt, Artificial Sequence
  Description of Artificial Sequence: Synthetic oligonucleotide
gcgagaaauaaagu

SEQ ID NO: 150908 - RNA, 14 nt, Artificial Sequence
  Description of Artificial Sequence: Synthetic oligonucleotide
cgagaaauaaaguu

SEQ ID NO: 150909 - RNA, 12 nt, Artificial Sequence
  Description of Artificial Sequence: Synthetic oligonucleotide
aggaaaugaucc

SEQ ID NO: 150910 - RNA, 13 nt, Artificial Sequence
  Description of Artificial Sequence: Synthetic oligonucleotide
gaagaaaugaaac

SEQ ID NO: 150911 - RNA, 13 nt, Artificial Sequence
  Description of Artificial Sequence: Synthetic oligonucleotide
guuuccauccucc

SEQ ID NO: 150912 - RNA, 15 nt, Artificial Sequence
  Description of Artificial Sequence: Synthetic oligonucleotide
acugaaaaucuuuga

SEQ ID NO: 150913 - RNA, 11 nt, Artificial Sequence
  Description of Artificial Sequence: Synthetic oligonucleotide
ugccguucagg

SEQ ID NO: 150914 - RNA, 13 nt, Artificial Sequence
  Description of Artificial Sequence: Synthetic oligonucleotide
caggguccagaag

SEQ ID NO: 150915 - RNA, 13 nt, Artificial Sequence
  Description of Artificial Sequence: Synthetic oligonucleotide
ucaagacugcuug

SEQ ID NO: 150916 - RNA, 13 nt, Artificial Sequence
  Description of Artificial Sequence: Synthetic oligonucleotide
uccaugucuuugg

SEQ ID NO: 150917 - RNA, 11 nt, Artificial Sequence
  Description of Artificial Sequence: Synthetic oligonucleotide
gccugaaacac

SEQ ID NO: 150918 - RNA, 12 nt, Artificial Sequence
  Description of Artificial Sequence: Synthetic oligonucleotide
ucucuguaccuc

SEQ ID NO: 150919 - RNA, 12 nt, Artificial Sequence
  Description of Artificial Sequence: Synthetic oligonucleotide
agcaagacaaga

SEQ ID NO: 150920 - RNA, 13 nt, Artificial Sequence
  Description of Artificial Sequence: Synthetic oligonucleotide
gcaagacaagaaa

SEQ ID NO: 150921 - RNA, 12 nt, Artificial Sequence
  Description of Artificial Sequence: Synthetic oligonucleotide
uguacaagaucc

SEQ ID NO: 150922 - RNA, 12 nt, Artificial Sequence
  Description of Artificial Sequence: Synthetic oligonucleotide
cguacuugcaga

SEQ ID NO: 150923 - RNA, 13 nt, Artificial Sequence
  Description of Artificial Sequence: Synthetic oligonucleotide
cgaucgauacaga

SEQ ID NO: 150924 - RNA, 13 nt, Artificial Sequence
  Description of Artificial Sequence: Synthetic oligonucleotide
uauaaaaauaaau

SEQ ID NO: 150925 - RNA, 13 nt, Artificial Sequence
  Description of Artificial Sequence: Synthetic oligonucleotide
uaaaaauaaauau

SEQ ID NO: 150926 - RNA, 13 nt, Artificial Sequence
  Description of Artificial Sequence: Synthetic oligonucleotide
uuugacugcugug

SEQ ID NO: 150927 - RNA, 13 nt, Artificial Sequence
  Description of Artificial Sequence: Synthetic oligonucleotide
ggagaugagagac

SEQ ID NO: 150928 - RNA, 10 nt, Artificial Sequence
  Description of Artificial Sequence: Synthetic oligonucleotide
ucccacuugg

SEQ ID NO: 150929 - RNA, 10 nt, Artificial Sequence
  Description of Artificial Sequence: Synthetic oligonucleotide
guucacggcc

SEQ ID NO: 150930 - RNA, 12 nt, Artificial Sequence
  Description of Artificial Sequence: Synthetic oligonucleotide
accaucacacca

SEQ ID NO: 150931 - RNA, 10 nt, Artificial Sequence
  Description of Artificial Sequence: Synthetic oligonucleotide
cugcggguuu

SEQ ID NO: 150932 - RNA, 9 nt, Artificial Sequence
  Description of Artificial Sequence: Synthetic oligonucleotide
uccaguuug

SEQ ID NO: 150933 - RNA, 12 nt, Artificial Sequence
  Description of Artificial Sequence: Synthetic oligonucleotide
uuaaggacuucu

SEQ ID NO: 150934 - RNA, 12 nt, Artificial Sequence
  Description of Artificial Sequence: Synthetic oligonucleotide
agugggacagag

SEQ ID NO: 150935 - RNA, 13 nt, Artificial Sequence
  Description of Artificial Sequence: Synthetic oligonucleotide
auuuguuauugug

SEQ ID NO: 150936 - RNA, 12 nt, Artificial Sequence
  Description of Artificial Sequence: Synthetic oligonucleotide
ucaaaugcauuu

SEQ ID NO: 150937 - RNA, 9 nt, Artificial Sequence
  Description of Artificial Sequence: Synthetic oligonucleotide
aggaaagcc

SEQ ID NO: 150938 - RNA, 10 nt, Artificial Sequence
  Description of Artificial Sequence: Synthetic oligonucleotide
ggaaagcccu

SEQ ID NO: 150939 - RNA, 11 nt, Artificial Sequence
  Description of Artificial Sequence: Synthetic oligonucleotide
ccagcauggcc

SEQ ID NO: 150940 - RNA, 10 nt, Artificial Sequence
  Description of Artificial Sequence: Synthetic oligonucleotide
uucucccuga

SEQ ID NO: 150941 - RNA, 11 nt, Artificial Sequence
  Description of Artificial Sequence: Synthetic oligonucleotide
aagaagcccuu

SEQ ID NO: 150942 - RNA, 11 nt, Artificial Sequence
  Description of Artificial Sequence: Synthetic oligonucleotide
gaagcccuuca

SEQ ID NO: 150943 - RNA, 10 nt, Artificial Sequence
  Description of Artificial Sequence: Synthetic oligonucleotide
cccuucagcg

SEQ ID NO: 150944 - RNA, 10 nt, Artificial Sequence
  Description of Artificial Sequence: Synthetic oligonucleotide
cuucagcggc

SEQ ID NO: 150945 - RNA, 11 nt, Artificial Sequence
  Description of Artificial Sequence: Synthetic oligonucleotide
cagcggccagu

SEQ ID NO: 150946 - RNA, 11 nt, Artificial Sequence
  Description of Artificial Sequence: Synthetic oligonucleotide
gaaaagcuccg

SEQ ID NO: 150947 - RNA, 10 nt, Artificial Sequence
  Description of Artificial Sequence: Synthetic oligonucleotide
aaagcuccgg

SEQ ID NO: 150948 - RNA, 12 nt, Artificial Sequence
  Description of Artificial Sequence: Synthetic oligonucleotide
gucaacagucug

SEQ ID NO: 150949 - RNA, 12 nt, Artificial Sequence
  Description of Artificial Sequence: Synthetic oligonucleotide
agaguucaaaag

SEQ ID NO: 150950 - RNA, 12 nt, Artificial Sequence
  Description of Artificial Sequence: Synthetic oligonucleotide
gaguucaaaagc

SEQ ID NO: 150951 - RNA, 11 nt, Artificial Sequence
  Description of Artificial Sequence: Synthetic oligonucleotide
ucaaaagcccu

SEQ ID NO: 150952 - RNA, 11 nt, Artificial Sequence
  Description of Artificial Sequence: Synthetic oligonucleotide
caaaagcccuu

SEQ ID NO: 150953 - RNA, 11 nt, Artificial Sequence
  Description of Artificial Sequence: Synthetic oligonucleotide
aaagcccuuca

SEQ ID NO: 150954 - RNA, 11 nt, Artificial Sequence
  Description of Artificial Sequence: Synthetic oligonucleotide
aagcccuucag

SEQ ID NO: 150955 - RNA, 12 nt, Artificial Sequence
  Description of Artificial Sequence: Synthetic oligonucleotide
ugaagccgcucg

SEQ ID NO: 150956 - RNA, 11 nt, Artificial Sequence
  Description of Artificial Sequence: Synthetic oligonucleotide
acgccagucaa

SEQ ID NO: 150957 - RNA, 12 nt, Artificial Sequence
  Description of Artificial Sequence: Synthetic oligonucleotide
ucuuggugcgug

SEQ ID NO: 150958 - RNA, 13 nt, Artificial Sequence
  Description of Artificial Sequence: Synthetic oligonucleotide
uuggauucaucag

SEQ ID NO: 150959 - RNA, 12 nt, Artificial Sequence
  Description of Artificial Sequence: Synthetic oligonucleotide
ggaauaccuaag

SEQ ID NO: 150960 - RNA, 11 nt, Artificial Sequence
  Description of Artificial Sequence: Synthetic oligonucleotide
uuugaggcuca

SEQ ID NO: 150961 - RNA, 10 nt, Artificial Sequence
  Description of Artificial Sequence: Synthetic oligonucleotide
cuacaauugg

SEQ ID NO: 150962 - RNA, 11 nt, Artificial Sequence
  Description of Artificial Sequence: Synthetic oligonucleotide
aguuaggagcc

SEQ ID NO: 150963 - RNA, 12 nt, Artificial Sequence
  Description of Artificial Sequence: Synthetic oligonucleotide
gucaauauccac

SEQ ID NO: 150964 - RNA, 12 nt, Artificial Sequence
  Description of Artificial Sequence: Synthetic oligonucleotide
uguucagucaca

SEQ ID NO: 150965 - RNA, 11 nt, Artificial Sequence
  Description of Artificial Sequence: Synthetic oligonucleotide
cacacacauac

SEQ ID NO: 150966 - RNA, 11 nt, Artificial Sequence
  Description of Artificial Sequence: Synthetic oligonucleotide
uccuuuugcuu

SEQ ID NO: 150967 - RNA, 15 nt, Artificial Sequence
  Description of Artificial Sequence: Synthetic oligonucleotide
uuuaaaguaauuuuu

SEQ ID NO: 150968 - RNA, 12 nt, Artificial Sequence
  Description of Artificial Sequence: Synthetic oligonucleotide
aacagucaaugg

SEQ ID NO: 150969 - RNA, 12 nt, Artificial Sequence
  Description of Artificial Sequence: Synthetic oligonucleotide
cgacaaaccaau

SEQ ID NO: 150970 - RNA, 11 nt, Artificial Sequence
  Description of Artificial Sequence: Synthetic oligonucleotide
cugcuaccacu

SEQ ID NO: 150971 - RNA, 12 nt, Artificial Sequence
  Description of Artificial Sequence: Synthetic oligonucleotide
caagcggucuua

SEQ ID NO: 150972 - RNA, 12 nt, Artificial Sequence
  Description of Artificial Sequence: Synthetic oligonucleotide
gucuuaccggcu

SEQ ID NO: 150973 - RNA, 10 nt, Artificial Sequence
  Description of Artificial Sequence: Synthetic oligonucleotide
auggguuacc

SEQ ID NO: 150974 - RNA, 10 nt, Artificial Sequence
  Description of Artificial Sequence: Synthetic oligonucleotide
uuaccugcga

SEQ ID NO: 150975 - RNA, 11 nt, Artificial Sequence
  Description of Artificial Sequence: Synthetic oligonucleotide
aucuugcugag

SEQ ID NO: 150976 - RNA, 12 nt, Artificial Sequence
  Description of Artificial Sequence: Synthetic oligonucleotide
gcauaaaacagu

SEQ ID NO: 150977 - RNA, 11 nt, Artificial Sequence
  Description of Artificial Sequence: Synthetic oligonucleotide
uccuuuauccu

SEQ ID NO: 150978 - RNA, 11 nt, Artificial Sequence
  Description of Artificial Sequence: Synthetic oligonucleotide
aacgcaaguug

SEQ ID NO: 150979 - RNA, 12 nt, Artificial Sequence
  Description of Artificial Sequence: Synthetic oligonucleotide
aacugaaaccau

SEQ ID NO: 150980 - RNA, 13 nt, Artificial Sequence
  Description of Artificial Sequence: Synthetic oligonucleotide
cuuuguuaaauau

SEQ ID NO: 150981 - RNA, 13 nt, Artificial Sequence
  Description of Artificial Sequence: Synthetic oligonucleotide
uauauuaaaaguu

SEQ ID NO: 150982 - RNA, 12 nt, Artificial Sequence
  Description of Artificial Sequence: Synthetic oligonucleotide
uuuugacuuaac

SEQ ID NO: 150983 - RNA, 12 nt, Artificial Sequence
  Description of Artificial Sequence: Synthetic oligonucleotide
caaacucagcac

SEQ ID NO: 150984 - RNA, 10 nt, Artificial Sequence
  Description of Artificial Sequence: Synthetic oligonucleotide
gcugaccuca

SEQ ID NO: 150985 - RNA, 13 nt, Artificial Sequence
  Description of Artificial Sequence: Synthetic oligonucleotide
uuauucagaucgc

SEQ ID NO: 150986 - RNA, 12 nt, Artificial Sequence
  Description of Artificial Sequence: Synthetic oligonucleotide
ggguucugggau

SEQ ID NO: 150987 - RNA, 14 nt, Artificial Sequence
  Description of Artificial Sequence: Synthetic oligonucleotide
uauuggaaauuaug

SEQ ID NO: 150988 - RNA, 12 nt, Artificial Sequence
  Description of Artificial Sequence: Synthetic oligonucleotide
uggaagcacuag

SEQ ID NO: 150989 - RNA, 12 nt, Artificial Sequence
  Description of Artificial Sequence: Synthetic oligonucleotide
uuuuuaugugga

SEQ ID NO: 150990 - RNA, 11 nt, Artificial Sequence
  Description of Artificial Sequence: Synthetic oligonucleotide
gaauugguaga

SEQ ID NO: 150991 - RNA, 12 nt, Artificial Sequence
  Description of Artificial Sequence: Synthetic oligonucleotide
uagacuuggaga

SEQ ID NO: 150992 - RNA, 12 nt, Artificial Sequence
  Description of Artificial Sequence: Synthetic oligonucleotide
uacaguauucca

SEQ ID NO: 150993 - RNA, 14 nt, Artificial Sequence
  Description of Artificial Sequence: Synthetic oligonucleotide
cacugaugaauuaa

SEQ ID NO: 150994 - RNA, 11 nt, Artificial Sequence
  Description of Artificial Sequence: Synthetic oligonucleotide
cacaucaucac

SEQ ID NO: 150995 - RNA, 12 nt, Artificial Sequence
  Description of Artificial Sequence: Synthetic oligonucleotide
ucaccaaacaga

SEQ ID NO: 150996 - RNA, 11 nt, Artificial Sequence
  Description of Artificial Sequence: Synthetic oligonucleotide
gaacaugaugg

SEQ ID NO: 150997 - RNA, 11 nt, Artificial Sequence
  Description of Artificial Sequence: Synthetic oligonucleotide
auguagacugc

SEQ ID NO: 150998 - RNA, 12 nt, Artificial Sequence
  Description of Artificial Sequence: Synthetic oligonucleotide
gaucuauuuaug

SEQ ID NO: 150999 - RNA, 11 nt, Artificial Sequence
  Description of Artificial Sequence: Synthetic oligonucleotide
cacuauuauca

SEQ ID NO: 151000 - RNA, 10 nt, Artificial Sequence
  Description of Artificial Sequence: Synthetic oligonucleotide
ucaguucugc

SEQ ID NO: 151001 - RNA, 12 nt, Artificial Sequence
  Description of Artificial Sequence: Synthetic oligonucleotide
gauuaaaccuac

SEQ ID NO: 151002 - RNA, 12 nt, Artificial Sequence
  Description of Artificial Sequence: Synthetic oligonucleotide
uaaaauccuucu

SEQ ID NO: 151003 - RNA, 11 nt, Artificial Sequence
  Description of Artificial Sequence: Synthetic oligonucleotide
augcuguagac

SEQ ID NO: 151004 - RNA, 12 nt, Artificial Sequence
  Description of Artificial Sequence: Synthetic oligonucleotide
ugauaggaauag

SEQ ID NO: 151005 - RNA, 10 nt, Artificial Sequence
  Description of Artificial Sequence: Synthetic oligonucleotide
auggcccuga

SEQ ID NO: 151006 - RNA, 10 nt, Artificial Sequence
  Description of Artificial Sequence: Synthetic oligonucleotide
uccucaagca

SEQ ID NO: 151007 - RNA, 9 nt, Artificial Sequence
  Description of Artificial Sequence: Synthetic oligonucleotide
uucagccca

SEQ ID NO: 151008 - RNA, 10 nt, Artificial Sequence
  Description of Artificial Sequence: Synthetic oligonucleotide
cugcugaacc

SEQ ID NO: 151009 - RNA, 11 nt, Artificial Sequence
  Description of Artificial Sequence: Synthetic oligonucleotide
aguucucuuca

SEQ ID NO: 151010 - RNA, 10 nt, Artificial Sequence
  Description of Artificial Sequence: Synthetic oligonucleotide
cagccuagag

SEQ ID NO: 151011 - RNA, 12 nt, Artificial Sequence
  Description of Artificial Sequence: Synthetic oligonucleotide
ucugugaagugu

SEQ ID NO: 151012 - RNA, 13 nt, Artificial Sequence
  Description of Artificial Sequence: Synthetic oligonucleotide
gagaaaauuucaa

SEQ ID NO: 151013 - RNA, 10 nt, Artificial Sequence
  Description of Artificial Sequence: Synthetic oligonucleotide
auccuccuga

SEQ ID NO: 151014 - RNA, 11 nt, Artificial Sequence
  Description of Artificial Sequence: Synthetic oligonucleotide
ugacaucauau

SEQ ID NO: 151015 - RNA, 12 nt, Artificial Sequence
  Description of Artificial Sequence: Synthetic oligonucleotide
aucuucaucaua

SEQ ID NO: 151016 - RNA, 12 nt, Artificial Sequence
  Description of Artificial Sequence: Synthetic oligonucleotide
acuagcuauuaa

SEQ ID NO: 151017 - RNA, 13 nt, Artificial Sequence
  Description of Artificial Sequence: Synthetic oligonucleotide
cucuacuaaaaau

SEQ ID NO: 151018 - RNA, 11 nt, Artificial Sequence
  Description of Artificial Sequence: Synthetic oligonucleotide
cuaucucgccu

SEQ ID NO: 151019 - RNA, 12 nt, Artificial Sequence
  Description of Artificial Sequence: Synthetic oligonucleotide
uucgguccaguu

SEQ ID NO: 151020 - RNA, 10 nt, Artificial Sequence
  Description of Artificial Sequence: Synthetic oligonucleotide
auguagccgc

SEQ ID NO: 151021 - RNA, 11 nt, Artificial Sequence
  Description of Artificial Sequence: Synthetic oligonucleotide
gaggagacuug

SEQ ID NO: 151022 - RNA, 11 nt, Artificial Sequence
  Description of Artificial Sequence: Synthetic oligonucleotide
aguagugagga

SEQ ID NO: 151023 - RNA, 13 nt, Artificial Sequence
  Description of Artificial Sequence: Synthetic oligonucleotide
agaugaguacaaa

SEQ ID NO: 151024 - RNA, 12 nt, Artificial Sequence
  Description of Artificial Sequence: Synthetic oligonucleotide
uuguuaaugggc

SEQ ID NO: 151025 - RNA, 12 nt, Artificial Sequence
  Description of Artificial Sequence: Synthetic oligonucleotide
uuuuaauuuauu

SEQ ID NO: 151026 - RNA, 11 nt, Artificial Sequence
  Description of Artificial Sequence: Synthetic oligonucleotide
auuuaaauaug

SEQ ID NO: 151027 - RNA, 12 nt, Artificial Sequence
  Description of Artificial Sequence: Synthetic oligonucleotide
auccuuuguuuc

SEQ ID NO: 151028 - RNA, 13 nt, Artificial Sequence
  Description of Artificial Sequence: Synthetic oligonucleotide
gucuaaguguuug

SEQ ID NO: 151029 - RNA, 11 nt, Artificial Sequence
  Description of Artificial Sequence: Synthetic oligonucleotide
ccugugacaaa

SEQ ID NO: 151030 - RNA, 12 nt, Artificial Sequence
  Description of Artificial Sequence: Synthetic oligonucleotide
caggcugaauua

SEQ ID NO: 151031 - RNA, 13 nt, Artificial Sequence
  Description of Artificial Sequence: Synthetic oligonucleotide
ucauucuuacaau

SEQ ID NO: 151032 - RNA, 14 nt, Artificial Sequence
  Description of Artificial Sequence: Synthetic oligonucleotide
cauucuuacaauug

SEQ ID NO: 151033 - RNA, 11 nt, Artificial Sequence
  Description of Artificial Sequence: Synthetic oligonucleotide
agagaguguac

SEQ ID NO: 151034 - RNA, 11 nt, Artificial Sequence
  Description of Artificial Sequence: Synthetic oligonucleotide
gaacucagcag

SEQ ID NO: 151035 - RNA, 12 nt, Artificial Sequence
  Description of Artificial Sequence: Synthetic oligonucleotide
uuauuuucagua

SEQ ID NO: 151036 - RNA, 11 nt, Artificial Sequence
  Description of Artificial Sequence: Synthetic oligonucleotide
cuuaaauggaa

SEQ ID NO: 151037 - RNA, 12 nt, Artificial Sequence
  Description of Artificial Sequence: Synthetic oligonucleotide
gccuaaaauugu

SEQ ID NO: 151038 - RNA, 12 nt, Artificial Sequence
  Description of Artificial Sequence: Synthetic oligonucleotide
acuaacaucugg

SEQ ID NO: 151039 - RNA, 11 nt, Artificial Sequence
  Description of Artificial Sequence: Synthetic oligonucleotide
gacugugagcu

SEQ ID NO: 151040 - RNA, 13 nt, Artificial Sequence
  Description of Artificial Sequence: Synthetic oligonucleotide
gcuuuuuauuaau

SEQ ID NO: 151041 - RNA, 12 nt, Artificial Sequence
  Description of Artificial Sequence: Synthetic oligonucleotide
ucuucuuacauu

SEQ ID NO: 151042 - RNA, 14 nt, Artificial Sequence
  Description of Artificial Sequence: Synthetic oligonucleotide
auuuguaaaaaugu

SEQ ID NO: 151043 - RNA, 14 nt, Artificial Sequence
  Description of Artificial Sequence: Synthetic oligonucleotide
ucuuaauucauauu

SEQ ID NO: 151044 - RNA, 12 nt, Artificial Sequence
  Description of Artificial Sequence: Synthetic oligonucleotide
aacuaaucauga

SEQ ID NO: 151045 - RNA, 11 nt, Artificial Sequence
  Description of Artificial Sequence: Synthetic oligonucleotide
cugcucuuggg

SEQ ID NO: 151046 - RNA, 12 nt, Artificial Sequence
  Description of Artificial Sequence: Synthetic oligonucleotide
aguagcuuugag

SEQ ID NO: 151047 - RNA, 13 nt, Artificial Sequence
  Description of Artificial Sequence: Synthetic oligonucleotide
acguaauauuuca

SEQ ID NO: 151048 - RNA, 12 nt, Artificial Sequence
  Description of Artificial Sequence: Synthetic oligonucleotide
auucucuucacu

SEQ ID NO: 151049 - RNA, 13 nt, Artificial Sequence
  Description of Artificial Sequence: Synthetic oligonucleotide
uaaugcuaagaaa

SEQ ID NO: 151050 - RNA, 11 nt, Artificial Sequence
  Description of Artificial Sequence: Synthetic oligonucleotide
cugaaaaucaa

SEQ ID NO: 151051 - RNA, 13 nt, Artificial Sequence
  Description of Artificial Sequence: Synthetic oligonucleotide
auaugauuacuuu

SEQ ID NO: 151052 - RNA, 13 nt, Artificial Sequence
  Description of Artificial Sequence: Synthetic oligonucleotide
auuuuguucuaca

SEQ ID NO: 151053 - RNA, 11 nt, Artificial Sequence
  Description of Artificial Sequence: Synthetic oligonucleotide
ccgggacucuc

SEQ ID NO: 151054 - RNA, 13 nt, Artificial Sequence
  Description of Artificial Sequence: Synthetic oligonucleotide
cuuuaaaguaaag

SEQ ID NO: 151055 - RNA, 12 nt, Artificial Sequence
  Description of Artificial Sequence: Synthetic oligonucleotide
cuggaagccugg

SEQ ID NO: 151056 - RNA, 13 nt, Artificial Sequence
  Description of Artificial Sequence: Synthetic oligonucleotide
aaacaaaagagag

SEQ ID NO: 151057 - RNA, 12 nt, Artificial Sequence
  Description of Artificial Sequence: Synthetic oligonucleotide
ucaguuaugccg

SEQ ID NO: 151058 - RNA, 12 nt, Artificial Sequence
  Description of Artificial Sequence: Synthetic oligonucleotide
aaaagaagucca

SEQ ID NO: 151059 - RNA, 10 nt, Artificial Sequence
  Description of Artificial Sequence: Synthetic oligonucleotide
ggugagguua

SEQ ID NO: 151060 - RNA, 10 nt, Artificial Sequence
  Description of Artificial Sequence: Synthetic oligonucleotide
ggaagaggac

SEQ ID NO: 151061 - RNA, 12 nt, Artificial Sequence
  Description of Artificial Sequence: Synthetic oligonucleotide
agcaaguauugu

SEQ ID NO: 151062 - RNA, 11 nt, Artificial Sequence
  Description of Artificial Sequence: Synthetic oligonucleotide
uuguagcacuc

SEQ ID NO: 151063 - RNA, 13 nt, Artificial Sequence
  Description of Artificial Sequence: Synthetic oligonucleotide
caaaaccacaaau

SEQ ID NO: 151064 - RNA, 11 nt, Artificial Sequence
  Description of Artificial Sequence: Synthetic oligonucleotide
aagcccauaca

SEQ ID NO: 151065 - RNA, 10 nt, Artificial Sequence
  Description of Artificial Sequence: Synthetic oligonucleotide
gcccauacag

SEQ ID NO: 151066 - RNA, 11 nt, Artificial Sequence
  Description of Artificial Sequence: Synthetic oligonucleotide
agaaaccuucc

SEQ ID NO: 151067 - RNA, 9 nt, Artificial Sequence
  Description of Artificial Sequence: Synthetic oligonucleotide
uauaccuac

SEQ ID NO: 151068 - RNA, 12 nt, Artificial Sequence
  Description of Artificial Sequence: Synthetic oligonucleotide
ccaguuuucgga

SEQ ID NO: 151069 - RNA, 8 nt, Artificial Sequence
  Description of Artificial Sequence: Synthetic oligonucleotide
gaacaggg

SEQ ID NO: 151070 - RNA, 12 nt, Artificial Sequence
  Description of Artificial Sequence: Synthetic oligonucleotide
uaacuuuccagu

SEQ ID NO: 151071 - RNA, 13 nt, Artificial Sequence
  Description of Artificial Sequence: Synthetic oligonucleotide
aaguuugguuuug

SEQ ID NO: 151072 - RNA, 11 nt, Artificial Sequence
  Description of Artificial Sequence: Synthetic oligonucleotide
uucccacugua

SEQ ID NO: 151073 - RNA, 12 nt, Artificial Sequence
  Description of Artificial Sequence: Synthetic oligonucleotide
gauaccauauga

SEQ ID NO: 151074 - RNA, 10 nt, Artificial Sequence
  Description of Artificial Sequence: Synthetic oligonucleotide
acaugggcug

SEQ ID NO: 151075 - RNA, 12 nt, Artificial Sequence
  Description of Artificial Sequence: Synthetic oligonucleotide
aacuuuuucaua

SEQ ID NO: 151076 - RNA, 11 nt, Artificial Sequence
  Description of Artificial Sequence: Synthetic oligonucleotide
augaggccgga

SEQ ID NO: 151077 - RNA, 10 nt, Artificial Sequence
  Description of Artificial Sequence: Synthetic oligonucleotide
cugcauuugu

SEQ ID NO: 151078 - RNA, 12 nt, Artificial Sequence
  Description of Artificial Sequence: Synthetic oligonucleotide
auguuuacuacc

SEQ ID NO: 151079 - RNA, 14 nt, Artificial Sequence
  Description of Artificial Sequence: Synthetic oligonucleotide
auuuuuugaugaaa

SEQ ID NO: 151080 - RNA, 13 nt, Artificial Sequence
  Description of Artificial Sequence: Synthetic oligonucleotide
agugugugaauuu

SEQ ID NO: 151081 - RNA, 12 nt, Artificial Sequence
  Description of Artificial Sequence: Synthetic oligonucleotide
agcaauguaugu

SEQ ID NO: 151082 - RNA, 13 nt, Artificial Sequence
  Description of Artificial Sequence: Synthetic oligonucleotide
aagcacauauaua

SEQ ID NO: 151083 - RNA, 13 nt, Artificial Sequence
  Description of Artificial Sequence: Synthetic oligonucleotide
uaauaguuucucc

SEQ ID NO: 151084 - RNA, 12 nt, Artificial Sequence
  Description of Artificial Sequence: Synthetic oligonucleotide
guuucuccaaau

SEQ ID NO: 151085 - RNA, 12 nt, Artificial Sequence
  Description of Artificial Sequence: Synthetic oligonucleotide
acuuccuagaaa

SEQ ID NO: 151086 - RNA, 12 nt, Artificial Sequence
  Description of Artificial Sequence: Synthetic oligonucleotide
acaccauauaug

SEQ ID NO: 151087 - RNA, 13 nt, Artificial Sequence
  Description of Artificial Sequence: Synthetic oligonucleotide
uauaugaauggag

SEQ ID NO: 151088 - RNA, 12 nt, Artificial Sequence
  Description of Artificial Sequence: Synthetic oligonucleotide
cauuuacaggga

SEQ ID NO: 151089 - RNA, 12 nt, Artificial Sequence
  Description of Artificial Sequence: Synthetic oligonucleotide
auuuacagggac

SEQ ID NO: 151090 - RNA, 9 nt, Artificial Sequence
  Description of Artificial Sequence: Synthetic oligonucleotide
gggaccuga

SEQ ID NO: 151091 - RNA, 13 nt, Artificial Sequence
  Description of Artificial Sequence: Synthetic oligonucleotide
guuugacugcauc

SEQ ID NO: 151092 - RNA, 12 nt, Artificial Sequence
  Description of Artificial Sequence: Synthetic oligonucleotide
uugacugcaucg

SEQ ID NO: 151093 - RNA, 11 nt, Artificial Sequence
  Description of Artificial Sequence: Synthetic oligonucleotide
aguucacaggg

SEQ ID NO: 151094 - RNA, 12 nt, Artificial Sequence
  Description of Artificial Sequence: Synthetic oligonucleotide
gcaccucugucc

SEQ ID NO: 151095 - RNA, 14 nt, Artificial Sequence
  Description of Artificial Sequence: Synthetic oligonucleotide
guuugucuuuuuaa

SEQ ID NO: 151096 - RNA, 13 nt, Artificial Sequence
  Description of Artificial Sequence: Synthetic oligonucleotide
uugucuuuuuaag

SEQ ID NO: 151097 - RNA, 12 nt, Artificial Sequence
  Description of Artificial Sequence: Synthetic oligonucleotide
cuaaagguuguc

SEQ ID NO: 151098 - RNA, 11 nt, Artificial Sequence
  Description of Artificial Sequence: Synthetic oligonucleotide
agguugucgac

SEQ ID NO: 151099 - RNA, 12 nt, Artificial Sequence
  Description of Artificial Sequence: Synthetic oligonucleotide
ccuggcaauugu

SEQ ID NO: 151100 - RNA, 11 nt, Artificial Sequence
  Description of Artificial Sequence: Synthetic oligonucleotide
guggugcgagg

SEQ ID NO: 151101 - RNA, 12 nt, Artificial Sequence
  Description of Artificial Sequence: Synthetic oligonucleotide
gagacaugaaau

SEQ ID NO: 151102 - RNA, 12 nt, Artificial Sequence
  Description of Artificial Sequence: Synthetic oligonucleotide
uauauuucucca

SEQ ID NO: 151103 - RNA, 9 nt, Artificial Sequence
  Description of Artificial Sequence: Synthetic oligonucleotide
augaaggcu

SEQ ID NO: 151104 - RNA, 10 nt, Artificial Sequence
  Description of Artificial Sequence: Synthetic oligonucleotide
cuggaguggu

SEQ ID NO: 151105 - RNA, 10 nt, Artificial Sequence
  Description of Artificial Sequence: Synthetic oligonucleotide
ggaagagagg

SEQ ID NO: 151106 - RNA, 11 nt, Artificial Sequence
  Description of Artificial Sequence: Synthetic oligonucleotide
uugcaucgggc

SEQ ID NO: 151107 - RNA, 12 nt, Artificial Sequence
  Description of Artificial Sequence: Synthetic oligonucleotide
uauccuacugug

SEQ ID NO: 151108 - RNA, 12 nt, Artificial Sequence
  Description of Artificial Sequence: Synthetic oligonucleotide
ccuacuguguaa

SEQ ID NO: 151109 - RNA, 11 nt, Artificial Sequence
  Description of Artificial Sequence: Synthetic oligonucleotide
cuuguagugua

SEQ ID NO: 151110 - RNA, 12 nt, Artificial Sequence
  Description of Artificial Sequence: Synthetic oligonucleotide
cuuuguugauug

SEQ ID NO: 151111 - RNA, 13 nt, Artificial Sequence
  Description of Artificial Sequence: Synthetic oligonucleotide
uuguugauugaaa

SEQ ID NO: 151112 - RNA, 14 nt, Artificial Sequence
  Description of Artificial Sequence: Synthetic oligonucleotide
ucuuuuucuuccau

SEQ ID NO: 151113 - RNA, 12 nt, Artificial Sequence
  Description of Artificial Sequence: Synthetic oligonucleotide
aucuuccuucua

SEQ ID NO: 151114 - RNA, 12 nt, Artificial Sequence
  Description of Artificial Sequence: Synthetic oligonucleotide
ugaaugcuucau

SEQ ID NO: 151115 - RNA, 12 nt, Artificial Sequence
  Description of Artificial Sequence: Synthetic oligonucleotide
gaaugcuucaug

SEQ ID NO: 151116 - RNA, 12 nt, Artificial Sequence
  Description of Artificial Sequence: Synthetic oligonucleotide
auucuacuuuga

SEQ ID NO: 151117 - RNA, 12 nt, Artificial Sequence
  Description of Artificial Sequence: Synthetic oligonucleotide
gcaacuacagac

SEQ ID NO: 151118 - RNA, 12 nt, Artificial Sequence
  Description of Artificial Sequence: Synthetic oligonucleotide
accaaggucaac

SEQ ID NO: 151119 - RNA, 12 nt, Artificial Sequence
  Description of Artificial Sequence: Synthetic oligonucleotide
gacuaucucgac

SEQ ID NO: 151120 - RNA, 12 nt, Artificial Sequence
  Description of Artificial Sequence: Synthetic oligonucleotide
accuucccaaac

SEQ ID NO: 151121 - RNA, 13 nt, Artificial Sequence
  Description of Artificial Sequence: Synthetic oligonucleotide
caagcuuagaacu

SEQ ID NO: 151122 - RNA, 14 nt, Artificial Sequence
  Description of Artificial Sequence: Synthetic oligonucleotide
gcuuagaacuuuaa

SEQ ID NO: 151123 - RNA, 13 nt, Artificial Sequence
  Description of Artificial Sequence: Synthetic oligonucleotide
aacuuuaagcaac

SEQ ID NO: 151124 - RNA, 10 nt, Artificial Sequence
  Description of Artificial Sequence: Synthetic oligonucleotide
agaccaccac

SEQ ID NO: 151125 - RNA, 13 nt, Artificial Sequence
  Description of Artificial Sequence: Synthetic oligonucleotide
cgagaaauaaagu

SEQ ID NO: 151126 - RNA, 13 nt, Artificial Sequence
  Description of Artificial Sequence: Synthetic oligonucleotide
gagaaauaaaguu

SEQ ID NO: 151127 - RNA, 11 nt, Artificial Sequence
  Description of Artificial Sequence: Synthetic oligonucleotide
ggaaaugaucc

SEQ ID NO: 151128 - RNA, 12 nt, Artificial Sequence
  Description of Artificial Sequence: Synthetic oligonucleotide
aagaaaugaaac

SEQ ID NO: 151129 - RNA, 12 nt, Artificial Sequence
  Description of Artificial Sequence: Synthetic oligonucleotide
uuuccauccucc

SEQ ID NO: 151130 - RNA, 14 nt, Artificial Sequence
  Description of Artificial Sequence: Synthetic oligonucleotide
cugaaaaucuuuga

SEQ ID NO: 151131 - RNA, 10 nt, Artificial Sequence
  Description of Artificial Sequence: Synthetic oligonucleotide
gccguucagg

SEQ ID NO: 151132 - RNA, 12 nt, Artificial Sequence
  Description of Artificial Sequence: Synthetic oligonucleotide
aggguccagaag

SEQ ID NO: 151133 - RNA, 12 nt, Artificial Sequence
  Description of Artificial Sequence: Synthetic oligonucleotide
caagacugcuug

SEQ ID NO: 151134 - RNA, 12 nt, Artificial Sequence
  Description of Artificial Sequence: Synthetic oligonucleotide
ccaugucuuugg

SEQ ID NO: 151135 - RNA, 10 nt, Artificial Sequence
  Description of Artificial Sequence: Synthetic oligonucleotide
ccugaaacac

SEQ ID NO: 151136 - RNA, 11 nt, Artificial Sequence
  Description of Artificial Sequence: Synthetic oligonucleotide
cucuguaccuc

SEQ ID NO: 151137 - RNA, 11 nt, Artificial Sequence
  Description of Artificial Sequence: Synthetic oligonucleotide
gcaagacaaga

SEQ ID NO: 151138 - RNA, 12 nt, Artificial Sequence
  Description of Artificial Sequence: Synthetic oligonucleotide
caagacaagaaa

SEQ ID NO: 151139 - RNA, 11 nt, Artificial Sequence
  Description of Artificial Sequence: Synthetic oligonucleotide
guacaagaucc

SEQ ID NO: 151140 - RNA, 11 nt, Artificial Sequence
  Description of Artificial Sequence: Synthetic oligonucleotide
guacuugcaga

SEQ ID NO: 151141 - RNA, 12 nt, Artificial Sequence
  Description of Artificial Sequence: Synthetic oligonucleotide
gaucgauacaga

SEQ ID NO: 151142 - RNA, 12 nt, Artificial Sequence
  Description of Artificial Sequence: Synthetic oligonucleotide
auaaaaauaaau

SEQ ID NO: 151143 - RNA, 12 nt, Artificial Sequence
  Description of Artificial Sequence: Synthetic oligonucleotide
aaaaauaaauau

SEQ ID NO: 151144 - RNA, 12 nt, Artificial Sequence
  Description of Artificial Sequence: Synthetic oligonucleotide
uugacugcugug

SEQ ID NO: 151145 - RNA, 12 nt, Artificial Sequence
  Description of Artificial Sequence: Synthetic oligonucleotide
gagaugagagac

SEQ ID NO: 151146 - RNA, 9 nt, Artificial Sequence
  Description of Artificial Sequence: Synthetic oligonucleotide
cccacuugg

SEQ ID NO: 151147 - RNA, 3636 nt, Homo sapiens
cagcgacgucgaggcgcucaugguugcaggcgggcgccgccguucaguucagggucugagccuggaggagugagccaggcagugagacuggcucgggcgggccgggacgcgucguugcagcagcggcucccagcucccagccaggauuccgcgcgccccuucacgcgcccugcuccugaacuucagcuccugcacaguccuccccaccgcaaggcucaaggcgccgccggcguggaccgcgcacggccucuaggucuccucgccaggacagcaaccucuccccuggcccucaugggcaccgucagcuccaggcgguccugguggccgcugccacugcugcugcugcugcugcugcuccugggucccgcgggcgcccgugcgcaggaggacgaggacggcgacuacgaggagcuggugcuagccuugcguuccgaggaggacggccuggccgaagcacccgagcacggaaccacagccaccuuccaccgcugcgccaaggauccguggagguugccuggcaccuacgugguggugcugaaggaggagacccaccucucgcagucagagcgcacugcccgccgccugcaggcccaggcugcccgccggggauaccucaccaagauccugcaugucuuccauggccuucuuccuggcuuccuggugaagaugaguggcgaccugcuggagcuggccuugaaguugccccaugucgacuacaucgaggaggacuccucugucuuugcccagagcaucccguggaaccuggagcggauuaccccuccacgguaccgggcggaugaauaccagccccccgacggaggcagccugguggagguguaucuccuagacaccagcauacagagugaccaccgggaaaucgagggcagggucauggucaccgacuucgagaaugugcccgaggaggacgggacccgcuuccacagacaggccagcaagugugacagucauggcacccaccuggcagggguggucagcggccgggaugccggcguggccaagggugccagcaugcgcagccugcgcgugcucaacugccaagggaagggcacgguuagcggcacccucauaggccuggaguuuauucggaaaagccagcugguccagccuguggggccacugguggugcugcugccccuggcggguggguacagccgcguccucaacgccgccugccagcgccuggcgagggcuggggucgugcuggucaccgcugccggcaacuuccgggacgaugccugccucuacuccccagccucagcucccgaggucaucacaguuggggccaccaaugcccaagaccagccggugacccuggggacuuuggggaccaacuuuggccgcuguguggaccucuuugccccaggggaggacaucauuggugccuccagcgacugcagcaccugcuuugugucacagagugggacaucacaggcugcugcccacguggcuggcauugcagccaugaugcugucugccgagccggagcucacccuggccgaguugaggcagagacugauccacuucucugccaaagaugucaucaaugaggccugguucccugaggaccagcggguacugacccccaaccugguggccgcccugccccccagcacccauggggcagguuggcagcuguuuugcaggacuguauggucagcacacucggggccuacacggauggccacagccgucgcccgcugcgccccagaugaggagcugcugagcugcuccaguuucuccaggagugggaagcggcggggcgagcgcauggaggcccaagggggcaagcuggucugccgggcccacaacgcuuuugggggugagggugucuacgccauugccaggugcugccugcuaccccaggccaacugcagcguccacacagcuccaccagcugaggccagcauggggacccguguccacugccaccaacagggccacguccucacaggcugcagcucccacugggagguggaggaccuuggcacccacaagccgccugugcugaggccacgaggucagcccaaccagugcgugggccacagggaggccagcauccacgcuuccugcugccaugccccaggucuggaaugcaaagucaaggagcauggaaucccggccccucaggagcaggugaccguggccugcgaggagggcuggacccugacuggcugcagugcccucccugggaccucccacguccugggggccuacgccguagacaacacguguguagucaggagccgggacgucagcacuacaggcagcaccagcgaaggggccgugacagccguugccaucugcugccggagccggcaccuggcgcaggccucccaggagcuccagugacagccccaucccaggaugggugucuggggagggucaagggcuggggcugagcuuuaaaaugguuccgacuugucccucucucagcccuccauggccuggcacgaggggauggggaugcuuccgccuuuccggggcugcuggccuggcccuugaguggggcagccuccuugccuggaacucacucacucugggugccuccuccccagguggaggugccaggaagcucccucccucacuguggggcauuucaccauucaaacaggucgagcugugcucgggugcugccagcugcucccaaugugccgauguccgugggcagaaugacuuuuauugagcucuuguuccgugccaggcauucaauccucaggucuccaccaaggaggcaggauucuucccauggauaggggagggggcgguaggggcugcagggacaaacaucguuggggggugagugugaaaggugcugauggcccucaucuccagcuaacuguggagaagccccugggggcucccugauuaauggaggcuuagcuuucuggauggcaucuagccagaggcuggagacaggugcgccccugguggucacaggcugugccuugguuuccugagccaccuuuacucugcucuaugccaggcugugcuagcaacacccaaagguggccugcggggagccaucaccuaggacugacucggcagugugcaguggugcaugcacugucucagccaacccgcuccacuacccggcaggguacacauucgcaccccuacuucacagaggaagaaaccuggaaccagagggggcgugccugccaagcucacacagcaggaacugagccagaaacgcagauugggcuggcucugaagccaagccucuucuuacuucacccggcugggcuccucauuuuuacggguaacagugaggcugggaaggggaacacagaccaggaagcucggugagugauggcagaacgaugccugcaggcauggaacuuuuuccguuaucacccaggccugauucacuggccuggcggagaugcuucuaaggcauggucgggggagagggccaacaacugucccuccuugagcaccagccccacccaagcaagcagacauuuaucuuuugggucuguccucucuguugccuuuuuacagccaacuuuucuagaccuguuuugcuuuuguaacuugaagauauuuauucuggguuuuguagcauuuuuauuaauauggugacuuuuuaaaauaaaaacaaacaaacguuguccu

SEQ ID NO: 151148 - RNA, 19 nt, Artificial Sequence
  Description of Artificial Sequence: Synthetic oligonucleotide
cagcgacgucgaggcgcuc

SEQ ID NO: 151149 - RNA, 19 nt, Artificial Sequence
  Description of Artificial Sequence: Synthetic oligonucleotide
caugguugcaggcgggcgc

SEQ ID NO: 151150 - RNA, 19 nt, Artificial Sequence
  Description of Artificial Sequence: Synthetic oligonucleotide
ccgccguucaguucagggu

SEQ ID NO: 151151 - RNA, 19 nt, Artificial Sequence
  Description of Artificial Sequence: Synthetic oligonucleotide
ucugagccuggaggaguga

SEQ ID NO: 151152 - RNA, 19 nt, Artificial Sequence
  Description of Artificial Sequence: Synthetic oligonucleotide
agccaggcagugagacugg

SEQ ID NO: 151153 - RNA, 19 nt, Artificial Sequence
  Description of Artificial Sequence: Synthetic oligonucleotide
gcucgggcgggccgggacg

SEQ ID NO: 151154 - RNA, 19 nt, Artificial Sequence
  Description of Artificial Sequence: Synthetic oligonucleotide
gcgucguugcagcagcggc

SEQ ID NO: 151155 - RNA, 19 nt, Artificial Sequence
  Description of Artificial Sequence: Synthetic oligonucleotide
cucccagcucccagccagg

SEQ ID NO: 151156 - RNA, 19 nt, Artificial Sequence
  Description of Artificial Sequence: Synthetic oligonucleotide
gauuccgcgcgccccuuca

SEQ ID NO: 151157 - RNA, 19 nt, Artificial Sequence
  Description of Artificial Sequence: Synthetic oligonucleotide
acgcgcccugcuccugaac

SEQ ID NO: 151158 - RNA, 19 nt, Artificial Sequence
  Description of Artificial Sequence: Synthetic oligonucleotide
cuucagcuccugcacaguc

SEQ ID NO: 151159 - RNA, 19 nt, Artificial Sequence
  Description of Artificial Sequence: Synthetic oligonucleotide
ccuccccaccgcaaggcuc

SEQ ID NO: 151160 - RNA, 19 nt, Artificial Sequence
  Description of Artificial Sequence: Synthetic oligonucleotide
caaggcgccgccggcgugg

SEQ ID NO: 151161 - RNA, 19 nt, Artificial Sequence
  Description of Artificial Sequence: Synthetic oligonucleotide
gaccgcgcacggccucuag

SEQ ID NO: 151162 - RNA, 19 nt, Artificial Sequence
  Description of Artificial Sequence: Synthetic oligonucleotide
ggucuccucgccaggacag

SEQ ID NO: 151163 - RNA, 19 nt, Artificial Sequence
  Description of Artificial Sequence: Synthetic oligonucleotide
gcaaccucuccccuggccc

SEQ ID NO: 151164 - RNA, 19 nt, Artificial Sequence
  Description of Artificial Sequence: Synthetic oligonucleotide
cucaugggcaccgucagcu

SEQ ID NO: 151165 - RNA, 19 nt, Artificial Sequence
  Description of Artificial Sequence: Synthetic oligonucleotide
uccaggcgguccugguggc

SEQ ID NO: 151166 - RNA, 19 nt, Artificial Sequence
  Description of Artificial Sequence: Synthetic oligonucleotide
ccgcugccacugcugcugc

SEQ ID NO: 151167 - RNA, 19 nt, Artificial Sequence
  Description of Artificial Sequence: Synthetic oligonucleotide
cugcugcugcugcuccugg

SEQ ID NO: 151168 - RNA, 19 nt, Artificial Sequence
  Description of Artificial Sequence: Synthetic oligonucleotide
ggucccgcgggcgcccgug

SEQ ID NO: 151169 - RNA, 19 nt, Artificial Sequence
  Description of Artificial Sequence: Synthetic oligonucleotide
gcgcaggaggacgaggacg

SEQ ID NO: 151170 - RNA, 19 nt, Artificial Sequence
  Description of Artificial Sequence: Synthetic oligonucleotide
ggcgacuacgaggagcugg

SEQ ID NO: 151171 - RNA, 19 nt, Artificial Sequence
  Description of Artificial Sequence: Synthetic oligonucleotide
gugcuagccuugcguuccg

SEQ ID NO: 151172 - RNA, 19 nt, Artificial Sequence
  Description of Artificial Sequence: Synthetic oligonucleotide
gaggaggacggccuggccg

SEQ ID NO: 151173 - RNA, 19 nt, Artificial Sequence
  Description of Artificial Sequence: Synthetic oligonucleotide
gaagcacccgagcacggaa

SEQ ID NO: 151174 - RNA, 19 nt, Artificial Sequence
  Description of Artificial Sequence: Synthetic oligonucleotide
accacagccaccuuccacc

SEQ ID NO: 151175 - RNA, 19 nt, Artificial Sequence
  Description of Artificial Sequence: Synthetic oligonucleotide
cgcugcgccaaggauccgu

SEQ ID NO: 151176 - RNA, 19 nt, Artificial Sequence
  Description of Artificial Sequence: Synthetic oligonucleotide
uggagguugccuggcaccu

SEQ ID NO: 151177 - RNA, 19 nt, Artificial Sequence
  Description of Artificial Sequence: Synthetic oligonucleotide
uacgugguggugcugaagg

SEQ ID NO: 151178 - RNA, 19 nt, Artificial Sequence
  Description of Artificial Sequence: Synthetic oligonucleotide
gaggagacccaccucucgc

SEQ ID NO: 151179 - RNA, 19 nt, Artificial Sequence
  Description of Artificial Sequence: Synthetic oligonucleotide
cagucagagcgcacugccc

SEQ ID NO: 151180 - RNA, 19 nt, Artificial Sequence
  Description of Artificial Sequence: Synthetic oligonucleotide
cgccgccugcaggcccagg

SEQ ID NO: 151181 - RNA, 19 nt, Artificial Sequence
  Description of Artificial Sequence: Synthetic oligonucleotide
gcugcccgccggggauacc

SEQ ID NO: 151182 - RNA, 19 nt, Artificial Sequence
  Description of Artificial Sequence: Synthetic oligonucleotide
cucaccaagauccugcaug

SEQ ID NO: 151183 - RNA, 19 nt, Artificial Sequence
  Description of Artificial Sequence: Synthetic oligonucleotide
gucuuccauggccuucuuc

SEQ ID NO: 151184 - RNA, 19 nt, Artificial Sequence
  Description of Artificial Sequence: Synthetic oligonucleotide
ccuggcuuccuggugaaga

SEQ ID NO: 151185 - RNA, 19 nt, Artificial Sequence
  Description of Artificial Sequence: Synthetic oligonucleotide
augaguggcgaccugcugg

SEQ ID NO: 151186 - RNA, 19 nt, Artificial Sequence
  Description of Artificial Sequence: Synthetic oligonucleotide
gagcuggccuugaaguugc

SEQ ID NO: 151187 - RNA, 19 nt, Artificial Sequence
  Description of Artificial Sequence: Synthetic oligonucleotide
ccccaugucgacuacaucg

SEQ ID NO: 151188 - RNA, 19 nt, Artificial Sequence
  Description of Artificial Sequence: Synthetic oligonucleotide
gaggaggacuccucugucu

SEQ ID NO: 151189 - RNA, 19 nt, Artificial Sequence
  Description of Artificial Sequence: Synthetic oligonucleotide
uuugcccagagcaucccgu

SEQ ID NO: 151190 - RNA, 19 nt, Artificial Sequence
  Description of Artificial Sequence: Synthetic oligonucleotide
uggaaccuggagcggauua

SEQ ID NO: 151191 - RNA, 19 nt, Artificial Sequence
  Description of Artificial Sequence: Synthetic oligonucleotide
accccuccacgguaccggg

SEQ ID NO: 151192 - RNA, 19 nt, Artificial Sequence
  Description of Artificial Sequence: Synthetic oligonucleotide
gcggaugaauaccagcccc

SEQ ID NO: 151193 - RNA, 19 nt, Artificial Sequence
  Description of Artificial Sequence: Synthetic oligonucleotide
cccgacggaggcagccugg

SEQ ID NO: 151194 - RNA, 19 nt, Artificial Sequence
  Description of Artificial Sequence: Synthetic oligonucleotide
guggagguguaucuccuag

SEQ ID NO: 151195 - RNA, 19 nt, Artificial Sequence
  Description of Artificial Sequence: Synthetic oligonucleotide
gacaccagcauacagagug

SEQ ID NO: 151196 - RNA, 19 nt, Artificial Sequence
  Description of Artificial Sequence: Synthetic oligonucleotide
gaccaccgggaaaucgagg

SEQ ID NO: 151197 - RNA, 19 nt, Artificial Sequence
  Description of Artificial Sequence: Synthetic oligonucleotide
ggcagggucauggucaccg

SEQ ID NO: 151198 - RNA, 19 nt, Artificial Sequence
  Description of Artificial Sequence: Synthetic oligonucleotide
gacuucgagaaugugcccg

SEQ ID NO: 151199 - RNA, 19 nt, Artificial Sequence
  Description of Artificial Sequence: Synthetic oligonucleotide
gaggaggacgggacccgcu

SEQ ID NO: 151200 - RNA, 19 nt, Artificial Sequence
  Description of Artificial Sequence: Synthetic oligonucleotide
uuccacagacaggccagca

SEQ ID NO: 151201 - RNA, 19 nt, Artificial Sequence
  Description of Artificial Sequence: Synthetic oligonucleotide
aagugugacagucauggca

SEQ ID NO: 151202 - RNA, 19 nt, Artificial Sequence
  Description of Artificial Sequence: Synthetic oligonucleotide
acccaccuggcaggggugg

SEQ ID NO: 151203 - RNA, 19 nt, Artificial Sequence
  Description of Artificial Sequence: Synthetic oligonucleotide
gucagcggccgggaugccg

SEQ ID NO: 151204 - RNA, 19 nt, Artificial Sequence
  Description of Artificial Sequence: Synthetic oligonucleotide
ggcguggccaagggugcca

SEQ ID NO: 151205 - RNA, 19 nt, Artificial Sequence
  Description of Artificial Sequence: Synthetic oligonucleotide
agcaugcgcagccugcgcg

SEQ ID NO: 151206 - RNA, 19 nt, Artificial Sequence
  Description of Artificial Sequence: Synthetic oligonucleotide
gugcucaacugccaaggga

SEQ ID NO: 151207 - RNA, 19 nt, Artificial Sequence
  Description of Artificial Sequence: Synthetic oligonucleotide
aagggcacgguuagcggca

SEQ ID NO: 151208 - RNA, 19 nt, Artificial Sequence
  Description of Artificial Sequence: Synthetic oligonucleotide
acccucauaggccuggagu

SEQ ID NO: 151209 - RNA, 19 nt, Artificial Sequence
  Description of Artificial Sequence: Synthetic oligonucleotide
uuuauucggaaaagccagc

SEQ ID NO: 151210 - RNA, 19 nt, Artificial Sequence
  Description of Artificial Sequence: Synthetic oligonucleotide
cugguccagccuguggggc

SEQ ID NO: 151211 - RNA, 19 nt, Artificial Sequence
  Description of Artificial Sequence: Synthetic oligonucleotide
ccacugguggugcugcugc

SEQ ID NO: 151212 - RNA, 19 nt, Artificial Sequence
  Description of Artificial Sequence: Synthetic oligonucleotide
ccccuggcggguggguaca

SEQ ID NO: 151213 - RNA, 19 nt, Artificial Sequence
  Description of Artificial Sequence: Synthetic oligonucleotide
agccgcguccucaacgccg

SEQ ID NO: 151214 - RNA, 19 nt, Artificial Sequence
  Description of Artificial Sequence: Synthetic oligonucleotide
gccugccagcgccuggcga

SEQ ID NO: 151215 - RNA, 19 nt, Artificial Sequence
  Description of Artificial Sequence: Synthetic oligonucleotide
agggcuggggucgugcugg

SEQ ID NO: 151216 - RNA, 19 nt, Artificial Sequence
  Description of Artificial Sequence: Synthetic oligonucleotide
gucaccgcugccggcaacu

SEQ ID NO: 151217 - RNA, 19 nt, Artificial Sequence
  Description of Artificial Sequence: Synthetic oligonucleotide
uuccgggacgaugccugcc

SEQ ID NO: 151218 - RNA, 19 nt, Artificial Sequence
  Description of Artificial Sequence: Synthetic oligonucleotide
cucuacuccccagccucag

SEQ ID NO: 151219 - RNA, 19 nt, Artificial Sequence
  Description of Artificial Sequence: Synthetic oligonucleotide
gcucccgaggucaucacag

SEQ ID NO: 151220 - RNA, 19 nt, Artificial Sequence
  Description of Artificial Sequence: Synthetic oligonucleotide
guuggggccaccaaugccc

SEQ ID NO: 151221 - RNA, 19 nt, Artificial Sequence
  Description of Artificial Sequence: Synthetic oligonucleotide
caagaccagccggugaccc

SEQ ID NO: 151222 - RNA, 19 nt, Artificial Sequence
  Description of Artificial Sequence: Synthetic oligonucleotide
cuggggacuuuggggacca

SEQ ID NO: 151223 - RNA, 19 nt, Artificial Sequence
  Description of Artificial Sequence: Synthetic oligonucleotide
aacuuuggccgcugugugg

SEQ ID NO: 151224 - RNA, 19 nt, Artificial Sequence
  Description of Artificial Sequence: Synthetic oligonucleotide
gaccucuuugccccagggg

SEQ ID NO: 151225 - RNA, 19 nt, Artificial Sequence
  Description of Artificial Sequence: Synthetic oligonucleotide
gaggacaucauuggugccu

SEQ ID NO: 151226 - RNA, 19 nt, Artificial Sequence
  Description of Artificial Sequence: Synthetic oligonucleotide
uccagcgacugcagcaccu

SEQ ID NO: 151227 - RNA, 19 nt, Artificial Sequence
  Description of Artificial Sequence: Synthetic oligonucleotide
ugcuuugugucacagagug

SEQ ID NO: 151228 - RNA, 19 nt, Artificial Sequence
  Description of Artificial Sequence: Synthetic oligonucleotide
gggacaucacaggcugcug

SEQ ID NO: 151229 - RNA, 19 nt, Artificial Sequence
  Description of Artificial Sequence: Synthetic oligonucleotide
gcccacguggcuggcauug

SEQ ID NO: 151230 - RNA, 19 nt, Artificial Sequence
  Description of Artificial Sequence: Synthetic oligonucleotide
gcagccaugaugcugucug

SEQ ID NO: 151231 - RNA, 19 nt, Artificial Sequence
  Description of Artificial Sequence: Synthetic oligonucleotide
gccgagccggagcucaccc

SEQ ID NO: 151232 - RNA, 19 nt, Artificial Sequence
  Description of Artificial Sequence: Synthetic oligonucleotide
cuggccgaguugaggcaga

SEQ ID NO: 151233 - RNA, 19 nt, Artificial Sequence
  Description of Artificial Sequence: Synthetic oligonucleotide
agacugauccacuucucug

SEQ ID NO: 151234 - RNA, 19 nt, Artificial Sequence
  Description of Artificial Sequence: Synthetic oligonucleotide
gccaaagaugucaucaaug

SEQ ID NO: 151235 - RNA, 19 nt, Artificial Sequence
  Description of Artificial Sequence: Synthetic oligonucleotide
gaggccugguucccugagg

SEQ ID NO: 151236 - RNA, 19 nt, Artificial Sequence
  Description of Artificial Sequence: Synthetic oligonucleotide
gaccagcggguacugaccc

SEQ ID NO: 151237 - RNA, 19 nt, Artificial Sequence
  Description of Artificial Sequence: Synthetic oligonucleotide
cccaaccugguggccgccc

SEQ ID NO: 151238 - RNA, 19 nt, Artificial Sequence
  Description of Artificial Sequence: Synthetic oligonucleotide
cugccccccagcacccaug

SEQ ID NO: 151239 - RNA, 19 nt, Artificial Sequence
  Description of Artificial Sequence: Synthetic oligonucleotide
ggggcagguuggcagcugu

SEQ ID NO: 151240 - RNA, 19 nt, Artificial Sequence
  Description of Artificial Sequence: Synthetic oligonucleotide
uuuugcaggacuguauggu

SEQ ID NO: 151241 - RNA, 19 nt, Artificial Sequence
  Description of Artificial Sequence: Synthetic oligonucleotide
ucagcacacucggggccua

SEQ ID NO: 151242 - RNA, 19 nt, Artificial Sequence
  Description of Artificial Sequence: Synthetic oligonucleotide
acacggauggccacagccg

SEQ ID NO: 151243 - RNA, 19 nt, Artificial Sequence
  Description of Artificial Sequence: Synthetic oligonucleotide
gucgcccgcugcgccccag

SEQ ID NO: 151244 - RNA, 19 nt, Artificial Sequence
  Description of Artificial Sequence: Synthetic oligonucleotide
gaugaggagcugcugagcu

SEQ ID NO: 151245 - RNA, 19 nt, Artificial Sequence
  Description of Artificial Sequence: Synthetic oligonucleotide
ugcuccaguuucuccagga

SEQ ID NO: 151246 - RNA, 19 nt, Artificial Sequence
  Description of Artificial Sequence: Synthetic oligonucleotide
agugggaagcggcggggcg

SEQ ID NO: 151247 - RNA, 19 nt, Artificial Sequence
  Description of Artificial Sequence: Synthetic oligonucleotide
gagcgcauggaggcccaag

SEQ ID NO: 151248 - RNA, 19 nt, Artificial Sequence
  Description of Artificial Sequence: Synthetic oligonucleotide
gggggcaagcuggucugcc

SEQ ID NO: 151249 - RNA, 19 nt, Artificial Sequence
  Description of Artificial Sequence: Synthetic oligonucleotide
cgggcccacaacgcuuuug

SEQ ID NO: 151250 - RNA, 19 nt, Artificial Sequence
  Description of Artificial Sequence: Synthetic oligonucleotide
gggggugagggugucuacg

SEQ ID NO: 151251 - RNA, 19 nt, Artificial Sequence
  Description of Artificial Sequence: Synthetic oligonucleotide
gccauugccaggugcugcc

SEQ ID NO: 151252 - RNA, 19 nt, Artificial Sequence
  Description of Artificial Sequence: Synthetic oligonucleotide
cugcuaccccaggccaacu

SEQ ID NO: 151253 - RNA, 19 nt, Artificial Sequence
  Description of Artificial Sequence: Synthetic oligonucleotide
ugcagcguccacacagcuc

SEQ ID NO: 151254 - RNA, 19 nt, Artificial Sequence
  Description of Artificial Sequence: Synthetic oligonucleotide
ccaccagcugaggccagca

SEQ ID NO: 151255 - RNA, 19 nt, Artificial Sequence
  Description of Artificial Sequence: Synthetic oligonucleotide
auggggacccguguccacu

SEQ ID NO: 151256 - RNA, 19 nt, Artificial Sequence
  Description of Artificial Sequence: Synthetic oligonucleotide
ugccaccaacagggccacg

SEQ ID NO: 151257 - RNA, 19 nt, Artificial Sequence
  Description of Artificial Sequence: Synthetic oligonucleotide
guccucacaggcugcagcu

SEQ ID NO: 151258 - RNA, 19 nt, Artificial Sequence
  Description of Artificial Sequence: Synthetic oligonucleotide
ucccacugggagguggagg

SEQ ID NO: 151259 - RNA, 19 nt, Artificial Sequence
  Description of Artificial Sequence: Synthetic oligonucleotide
gaccuuggcacccacaagc

SEQ ID NO: 151260 - RNA, 19 nt, Artificial Sequence
  Description of Artificial Sequence: Synthetic oligonucleotide
ccgccugugcugaggccac

SEQ ID NO: 151261 - RNA, 19 nt, Artificial Sequence
  Description of Artificial Sequence: Synthetic oligonucleotide
cgaggucagcccaaccagu

SEQ ID NO: 151262 - RNA, 19 nt, Artificial Sequence
  Description of Artificial Sequence: Synthetic oligonucleotide
ugcgugggccacagggagg

SEQ ID NO: 151263 - RNA, 19 nt, Artificial Sequence
  Description of Artificial Sequence: Synthetic oligonucleotide
gccagcauccacgcuuccu

SEQ ID NO: 151264 - RNA, 19 nt, Artificial Sequence
  Description of Artificial Sequence: Synthetic oligonucleotide
ugcugccaugccccagguc

SEQ ID NO: 151265 - RNA, 19 nt, Artificial Sequence
  Description of Artificial Sequence: Synthetic oligonucleotide
cuggaaugcaaagucaagg

SEQ ID NO: 151266 - RNA, 19 nt, Artificial Sequence
  Description of Artificial Sequence: Synthetic oligonucleotide
gagcauggaaucccggccc

SEQ ID NO: 151267 - RNA, 19 nt, Artificial Sequence
  Description of Artificial Sequence: Synthetic oligonucleotide
ccucaggagcaggugaccg

SEQ ID NO: 151268 - RNA, 19 nt, Artificial Sequence
  Description of Artificial Sequence: Synthetic oligonucleotide
guggccugcgaggagggcu

SEQ ID NO: 151269 - RNA, 19 nt, Artificial Sequence
  Description of Artificial Sequence: Synthetic oligonucleotide
uggacccugacuggcugca

SEQ ID NO: 151270 - RNA, 19 nt, Artificial Sequence
  Description of Artificial Sequence: Synthetic oligonucleotide
agugcccucccugggaccu

SEQ ID NO: 151271 - RNA, 19 nt, Artificial Sequence
  Description of Artificial Sequence: Synthetic oligonucleotide
ucccacguccugggggccu

SEQ ID NO: 151272 - RNA, 19 nt, Artificial Sequence
  Description of Artificial Sequence: Synthetic oligonucleotide
uacgccguagacaacacgu

SEQ ID NO: 151273 - RNA, 19 nt, Artificial Sequence
  Description of Artificial Sequence: Synthetic oligonucleotide
uguguagucaggagccggg

SEQ ID NO: 151274 - RNA, 19 nt, Artificial Sequence
  Description of Artificial Sequence: Synthetic oligonucleotide
gacgucagcacuacaggca

SEQ ID NO: 151275 - RNA, 19 nt, Artificial Sequence
  Description of Artificial Sequence: Synthetic oligonucleotide
agcaccagcgaaggggccg

SEQ ID NO: 151276 - RNA, 19 nt, Artificial Sequence
  Description of Artificial Sequence: Synthetic oligonucleotide
gugacagccguugccaucu

SEQ ID NO: 151277 - RNA, 19 nt, Artificial Sequence
  Description of Artificial Sequence: Synthetic oligonucleotide
ugcugccggagccggcacc

SEQ ID NO: 151278 - RNA, 19 nt, Artificial Sequence
  Description of Artificial Sequence: Synthetic oligonucleotide
cuggcgcaggccucccagg

SEQ ID NO: 151279 - RNA, 19 nt, Artificial Sequence
  Description of Artificial Sequence: Synthetic oligonucleotide
gagcuccagugacagcccc

SEQ ID NO: 151280 - RNA, 19 nt, Artificial Sequence
  Description of Artificial Sequence: Synthetic oligonucleotide
caucccaggaugggugucu

SEQ ID NO: 151281 - RNA, 19 nt, Artificial Sequence
  Description of Artificial Sequence: Synthetic oligonucleotide
uggggagggucaagggcug

SEQ ID NO: 151282 - RNA, 19 nt, Artificial Sequence
  Description of Artificial Sequence: Synthetic oligonucleotide
ggggcugagcuuuaaaaug

SEQ ID NO: 151283 - RNA, 19 nt, Artificial Sequence
  Description of Artificial Sequence: Synthetic oligonucleotide
gguuccgacuugucccucu

SEQ ID NO: 151284 - RNA, 19 nt, Artificial Sequence
  Description of Artificial Sequence: Synthetic oligonucleotide
ucucagcccuccauggccu

SEQ ID NO: 151285 - RNA, 19 nt, Artificial Sequence
  Description of Artificial Sequence: Synthetic oligonucleotide
uggcacgaggggaugggga

SEQ ID NO: 151286 - RNA, 19 nt, Artificial Sequence
  Description of Artificial Sequence: Synthetic oligonucleotide
augcuuccgccuuuccggg

SEQ ID NO: 151287 - RNA, 19 nt, Artificial Sequence
  Description of Artificial Sequence: Synthetic oligonucleotide
ggcugcuggccuggcccuu

SEQ ID NO: 151288 - RNA, 19 nt, Artificial Sequence
  Description of Artificial Sequence: Synthetic oligonucleotide
ugaguggggcagccuccuu

SEQ ID NO: 151289 - RNA, 19 nt, Artificial Sequence
  Description of Artificial Sequence: Synthetic oligonucleotide
ugccuggaacucacucacu

SEQ ID NO: 151290 - RNA, 19 nt, Artificial Sequence
  Description of Artificial Sequence: Synthetic oligonucleotide
ucugggugccuccucccca

SEQ ID NO: 151291 - RNA, 19 nt, Artificial Sequence
  Description of Artificial Sequence: Synthetic oligonucleotide
agguggaggugccaggaag

SEQ ID NO: 151292 - RNA, 19 nt, Artificial Sequence
  Description of Artificial Sequence: Synthetic oligonucleotide
gcucccucccucacugugg

SEQ ID NO: 151293 - RNA, 19 nt, Artificial Sequence
  Description of Artificial Sequence: Synthetic oligonucleotide
gggcauuucaccauucaaa

SEQ ID NO: 151294 - RNA, 19 nt, Artificial Sequence
  Description of Artificial Sequence: Synthetic oligonucleotide
acaggucgagcugugcucg

SEQ ID NO: 151295 - RNA, 19 nt, Artificial Sequence
  Description of Artificial Sequence: Synthetic oligonucleotide
gggugcugccagcugcucc

SEQ ID NO: 151296 - RNA, 19 nt, Artificial Sequence
  Description of Artificial Sequence: Synthetic oligonucleotide
ccaaugugccgauguccgu

SEQ ID NO: 151297 - RNA, 19 nt, Artificial Sequence
  Description of Artificial Sequence: Synthetic oligonucleotide
ugggcagaaugacuuuuau

SEQ ID NO: 151298 - RNA, 19 nt, Artificial Sequence
  Description of Artificial Sequence: Synthetic oligonucleotide
uugagcucuuguuccgugc

SEQ ID NO: 151299 - RNA, 19 nt, Artificial Sequence
  Description of Artificial Sequence: Synthetic oligonucleotide
ccaggcauucaauccucag

SEQ ID NO: 151300 - RNA, 19 nt, Artificial Sequence
  Description of Artificial Sequence: Synthetic oligonucleotide
ggucuccaccaaggaggca

SEQ ID NO: 151301 - RNA, 19 nt, Artificial Sequence
  Description of Artificial Sequence: Synthetic oligonucleotide
aggauucuucccauggaua

SEQ ID NO: 151302 - RNA, 19 nt, Artificial Sequence
  Description of Artificial Sequence: Synthetic oligonucleotide
aggggagggggcgguaggg

SEQ ID NO: 151303 - RNA, 19 nt, Artificial Sequence
  Description of Artificial Sequence: Synthetic oligonucleotide
ggcugcagggacaaacauc

SEQ ID NO: 151304 - RNA, 19 nt, Artificial Sequence
  Description of Artificial Sequence: Synthetic oligonucleotide
cguuggggggugaguguga

SEQ ID NO: 151305 - RNA, 19 nt, Artificial Sequence
  Description of Artificial Sequence: Synthetic oligonucleotide
aaaggugcugauggcccuc

SEQ ID NO: 151306 - RNA, 19 nt, Artificial Sequence
  Description of Artificial Sequence: Synthetic oligonucleotide
caucuccagcuaacugugg

SEQ ID NO: 151307 - RNA, 19 nt, Artificial Sequence
  Description of Artificial Sequence: Synthetic oligonucleotide
gagaagccccugggggcuc

SEQ ID NO: 151308 - RNA, 19 nt, Artificial Sequence
  Description of Artificial Sequence: Synthetic oligonucleotide
cccugauuaauggaggcuu

SEQ ID NO: 151309 - RNA, 19 nt, Artificial Sequence
  Description of Artificial Sequence: Synthetic oligonucleotide
uagcuuucuggauggcauc

SEQ ID NO: 151310 - RNA, 19 nt, Artificial Sequence
  Description of Artificial Sequence: Synthetic oligonucleotide
cuagccagaggcuggagac

SEQ ID NO: 151311 - RNA, 19 nt, Artificial Sequence
  Description of Artificial Sequence: Synthetic oligonucleotide
caggugcgccccugguggu

SEQ ID NO: 151312 - RNA, 19 nt, Artificial Sequence
  Description of Artificial Sequence: Synthetic oligonucleotide
ucacaggcugugccuuggu

SEQ ID NO: 151313 - RNA, 19 nt, Artificial Sequence
  Description of Artificial Sequence: Synthetic oligonucleotide
uuuccugagccaccuuuac

SEQ ID NO: 151314 - RNA, 19 nt, Artificial Sequence
  Description of Artificial Sequence: Synthetic oligonucleotide
cucugcucuaugccaggcu

SEQ ID NO: 151315 - RNA, 19 nt, Artificial Sequence
  Description of Artificial Sequence: Synthetic oligonucleotide
ugugcuagcaacacccaaa

SEQ ID NO: 151316 - RNA, 19 nt, Artificial Sequence
  Description of Artificial Sequence: Synthetic oligonucleotide
agguggccugcggggagcc

SEQ ID NO: 151317 - RNA, 19 nt, Artificial Sequence
  Description of Artificial Sequence: Synthetic oligonucleotide
caucaccuaggacugacuc

SEQ ID NO: 151318 - RNA, 19 nt, Artificial Sequence
  Description of Artificial Sequence: Synthetic oligonucleotide
cggcagugugcaguggugc

SEQ ID NO: 151319 - RNA, 19 nt, Artificial Sequence
  Description of Artificial Sequence: Synthetic oligonucleotide
caugcacugucucagccaa

SEQ ID NO: 151320 - RNA, 19 nt, Artificial Sequence
  Description of Artificial Sequence: Synthetic oligonucleotide
acccgcuccacuacccggc

SEQ ID NO: 151321 - RNA, 19 nt, Artificial Sequence
  Description of Artificial Sequence: Synthetic oligonucleotide
caggguacacauucgcacc

SEQ ID NO: 151322 - RNA, 19 nt, Artificial Sequence
  Description of Artificial Sequence: Synthetic oligonucleotide
cccuacuucacagaggaag

SEQ ID NO: 151323 - RNA, 19 nt, Artificial Sequence
  Description of Artificial Sequence: Synthetic oligonucleotide
gaaaccuggaaccagaggg

SEQ ID NO: 151324 - RNA, 19 nt, Artificial Sequence
  Description of Artificial Sequence: Synthetic oligonucleotide
gggcgugccugccaagcuc

SEQ ID NO: 151325 - RNA, 19 nt, Artificial Sequence
  Description of Artificial Sequence: Synthetic oligonucleotide
cacacagcaggaacugagc

SEQ ID NO: 151326 - RNA, 19 nt, Artificial Sequence
  Description of Artificial Sequence: Synthetic oligonucleotide
ccagaaacgcagauugggc

SEQ ID NO: 151327 - RNA, 19 nt, Artificial Sequence
  Description of Artificial Sequence: Synthetic oligonucleotide
cuggcucugaagccaagcc

SEQ ID NO: 151328 - RNA, 19 nt, Artificial Sequence
  Description of Artificial Sequence: Synthetic oligonucleotide
cucuucuuacuucacccgg

SEQ ID NO: 151329 - RNA, 19 nt, Artificial Sequence
  Description of Artificial Sequence: Synthetic oligonucleotide
gcugggcuccucauuuuua

SEQ ID NO: 151330 - RNA, 19 nt, Artificial Sequence
  Description of Artificial Sequence: Synthetic oligonucleotide
acggguaacagugaggcug

SEQ ID NO: 151331 - RNA, 19 nt, Artificial Sequence
  Description of Artificial Sequence: Synthetic oligonucleotide
gggaaggggaacacagacc

SEQ ID NO: 151332 - RNA, 19 nt, Artificial Sequence
  Description of Artificial Sequence: Synthetic oligonucleotide
caggaagcucggugaguga

SEQ ID NO: 151333 - RNA, 19 nt, Artificial Sequence
  Description of Artificial Sequence: Synthetic oligonucleotide
auggcagaacgaugccugc

SEQ ID NO: 151334 - RNA, 19 nt, Artificial Sequence
  Description of Artificial Sequence: Synthetic oligonucleotide
caggcauggaacuuuuucc

SEQ ID NO: 151335 - RNA, 19 nt, Artificial Sequence
  Description of Artificial Sequence: Synthetic oligonucleotide
cguuaucacccaggccuga

SEQ ID NO: 151336 - RNA, 19 nt, Artificial Sequence
  Description of Artificial Sequence: Synthetic oligonucleotide
auucacuggccuggcggag

SEQ ID NO: 151337 - RNA, 19 nt, Artificial Sequence
  Description of Artificial Sequence: Synthetic oligonucleotide
gaugcuucuaaggcauggu

SEQ ID NO: 151338 - RNA, 19 nt, Artificial Sequence
  Description of Artificial Sequence: Synthetic oligonucleotide
ucgggggagagggccaaca

SEQ ID NO: 151339 - RNA, 19 nt, Artificial Sequence
  Description of Artificial Sequence: Synthetic oligonucleotide
aacugucccuccuugagca

SEQ ID NO: 151340 - RNA, 19 nt, Artificial Sequence
  Description of Artificial Sequence: Synthetic oligonucleotide
accagccccacccaagcaa

SEQ ID NO: 151341 - RNA, 19 nt, Artificial Sequence
  Description of Artificial Sequence: Synthetic oligonucleotide
agcagacauuuaucuuuug

SEQ ID NO: 151342 - RNA, 19 nt, Artificial Sequence
  Description of Artificial Sequence: Synthetic oligonucleotide
gggucuguccucucuguug

SEQ ID NO: 151343 - RNA, 19 nt, Artificial Sequence
  Description of Artificial Sequence: Synthetic oligonucleotide
gccuuuuuacagccaacuu

SEQ ID NO: 151344 - RNA, 19 nt, Artificial Sequence
  Description of Artificial Sequence: Synthetic oligonucleotide
uuucuagaccuguuuugcu

SEQ ID NO: 151345 - RNA, 19 nt, Artificial Sequence
  Description of Artificial Sequence: Synthetic oligonucleotide
uuuuguaacuugaagauau

SEQ ID NO: 151346 - RNA, 19 nt, Artificial Sequence
  Description of Artificial Sequence: Synthetic oligonucleotide
uuuauucuggguuuuguag

SEQ ID NO: 151347 - RNA, 19 nt, Artificial Sequence
  Description of Artificial Sequence: Synthetic oligonucleotide
gcauuuuuauuaauauggu

SEQ ID NO: 151348 - RNA, 19 nt, Artificial Sequence
  Description of Artificial Sequence: Synthetic oligonucleotide
ugacuuuuuaaaauaaaaa

SEQ ID NO: 151349 - RNA, 19 nt, Artificial Sequence
  Description of Artificial Sequence: Synthetic oligonucleotide
aacaaacaaacguuguccu

SEQ ID NO: 151350 - RNA, 25 nt, Artificial Sequence
  Description of Artificial Sequence: Synthetic oligonucleotide
cagcgacgucgaggcgcucaugguu

SEQ ID NO: 151351 - RNA, 25 nt, Artificial Sequence
  Description of Artificial Sequence: Synthetic oligonucleotide
ugcaggcgggcgccgccguucaguu

SEQ ID NO: 151352 - RNA, 25 nt, Artificial Sequence
  Description of Artificial Sequence: Synthetic oligonucleotide
ucagggucugagccuggaggaguga

SEQ ID NO: 151353 - RNA, 25 nt, Artificial Sequence
  Description of Artificial Sequence: Synthetic oligonucleotide
agccaggcagugagacuggcucggg

SEQ ID NO: 151354 - RNA, 25 nt, Artificial Sequence
  Description of Artificial Sequence: Synthetic oligonucleotide
gcgggccgggacgcgucguugcagc

SEQ ID NO: 151355 - RNA, 25 nt, Artificial Sequence
  Description of Artificial Sequence: Synthetic oligonucleotide
cagcggcucccagcucccagccagg

SEQ ID NO: 151356 - RNA, 25 nt, Artificial Sequence
  Description of Artificial Sequence: Synthetic oligonucleotide
gauuccgcgcgccccuucacgcgcc

SEQ ID NO: 151357 - RNA, 25 nt, Artificial Sequence
  Description of Artificial Sequence: Synthetic oligonucleotide
ccugcuccugaacuucagcuccugc

SEQ ID NO: 151358 - RNA, 25 nt, Artificial Sequence
  Description of Artificial Sequence: Synthetic oligonucleotide
cacaguccuccccaccgcaaggcuc

SEQ ID NO: 151359 - RNA, 25 nt, Artificial Sequence
  Description of Artificial Sequence: Synthetic oligonucleotide
caaggcgccgccggcguggaccgcg

SEQ ID NO: 151360 - RNA, 25 nt, Artificial Sequence
  Description of Artificial Sequence: Synthetic oligonucleotide
gcacggccucuaggucuccucgcca

SEQ ID NO: 151361 - RNA, 25 nt, Artificial Sequence
  Description of Artificial Sequence: Synthetic oligonucleotide
aggacagcaaccucuccccuggccc

SEQ ID NO: 151362 - RNA, 25 nt, Artificial Sequence
  Description of Artificial Sequence: Synthetic oligonucleotide
cucaugggcaccgucagcuccaggc

SEQ ID NO: 151363 - RNA, 25 nt, Artificial Sequence
  Description of Artificial Sequence: Synthetic oligonucleotide
cgguccugguggccgcugccacugc

SEQ ID NO: 151364 - RNA, 25 nt, Artificial Sequence
  Description of Artificial Sequence: Synthetic oligonucleotide
cugcugcugcugcugcugcuccugg

SEQ ID NO: 151365 - RNA, 25 nt, Artificial Sequence
  Description of Artificial Sequence: Synthetic oligonucleotide
ggucccgcgggcgcccgugcgcagg

SEQ ID NO: 151366 - RNA, 25 nt, Artificial Sequence
  Description of Artificial Sequence: Synthetic oligonucleotide
gaggacgaggacggcgacuacgagg

SEQ ID NO: 151367 - RNA, 25 nt, Artificial Sequence
  Description of Artificial Sequence: Synthetic oligonucleotide
gagcuggugcuagccuugcguuccg

SEQ ID NO: 151368 - RNA, 25 nt, Artificial Sequence
  Description of Artificial Sequence: Synthetic oligonucleotide
gaggaggacggccuggccgaagcac

SEQ ID NO: 151369 - RNA, 25 nt, Artificial Sequence
  Description of Artificial Sequence: Synthetic oligonucleotide
cccgagcacggaaccacagccaccu

SEQ ID NO: 151370 - RNA, 25 nt, Artificial Sequence
  Description of Artificial Sequence: Synthetic oligonucleotide
uuccaccgcugcgccaaggauccgu

SEQ ID NO: 151371 - RNA, 25 nt, Artificial Sequence
  Description of Artificial Sequence: Synthetic oligonucleotide
uggagguugccuggcaccuacgugg

SEQ ID NO: 151372 - RNA, 25 nt, Artificial Sequence
  Description of Artificial Sequence: Synthetic oligonucleotide
guggugcugaaggaggagacccacc

SEQ ID NO: 151373 - RNA, 25 nt, Artificial Sequence
  Description of Artificial Sequence: Synthetic oligonucleotide
cucucgcagucagagcgcacugccc

SEQ ID NO: 151374 - RNA, 25 nt, Artificial Sequence
  Description of Artificial Sequence: Synthetic oligonucleotide
cgccgccugcaggcccaggcugccc

SEQ ID NO: 151375 - RNA, 25 nt, Artificial Sequence
  Description of Artificial Sequence: Synthetic oligonucleotide
cgccggggauaccucaccaagaucc

SEQ ID NO: 151376 - RNA, 25 nt, Artificial Sequence
  Description of Artificial Sequence: Synthetic oligonucleotide
cugcaugucuuccauggccuucuuc

SEQ ID NO: 151377 - RNA, 25 nt, Artificial Sequence
  Description of Artificial Sequence: Synthetic oligonucleotide
ccuggcuuccuggugaagaugagug

SEQ ID NO: 151378 - RNA, 25 nt, Artificial Sequence
  Description of Artificial Sequence: Synthetic oligonucleotide
ggcgaccugcuggagcuggccuuga

SEQ ID NO: 151379 - RNA, 25 nt, Artificial Sequence
  Description of Artificial Sequence: Synthetic oligonucleotide
aaguugccccaugucgacuacaucg

SEQ ID NO: 151380 - RNA, 25 nt, Artificial Sequence
  Description of Artificial Sequence: Synthetic oligonucleotide
gaggaggacuccucugucuuugccc

SEQ ID NO: 151381 - RNA, 25 nt, Artificial Sequence
  Description of Artificial Sequence: Synthetic oligonucleotide
cagagcaucccguggaaccuggagc

SEQ ID NO: 151382 - RNA, 25 nt, Artificial Sequence
  Description of Artificial Sequence: Synthetic oligonucleotide
cggauuaccccuccacgguaccggg

SEQ ID NO: 151383 - RNA, 25 nt, Artificial Sequence
  Description of Artificial Sequence: Synthetic oligonucleotide
gcggaugaauaccagccccccgacg

SEQ ID NO: 151384 - RNA, 25 nt, Artificial Sequence
  Description of Artificial Sequence: Synthetic oligonucleotide
ggaggcagccugguggagguguauc

SEQ ID NO: 151385 - RNA, 25 nt, Artificial Sequence
  Description of Artificial Sequence: Synthetic oligonucleotide
cuccuagacaccagcauacagagug

SEQ ID NO: 151386 - RNA, 25 nt, Artificial Sequence
  Description of Artificial Sequence: Synthetic oligonucleotide
gaccaccgggaaaucgagggcaggg

SEQ ID NO: 151387 - RNA, 25 nt, Artificial Sequence
  Description of Artificial Sequence: Synthetic oligonucleotide
gucauggucaccgacuucgagaaug

SEQ ID NO: 151388 - RNA, 25 nt, Artificial Sequence
  Description of Artificial Sequence: Synthetic oligonucleotide
gugcccgaggaggacgggacccgcu

SEQ ID NO: 151389 - RNA, 25 nt, Artificial Sequence
  Description of Artificial Sequence: Synthetic oligonucleotide
uuccacagacaggccagcaagugug

SEQ ID NO: 151390 - RNA, 25 nt, Artificial Sequence
  Description of Artificial Sequence: Synthetic oligonucleotide
gacagucauggcacccaccuggcag

SEQ ID NO: 151391 - RNA, 25 nt, Artificial Sequence
  Description of Artificial Sequence: Synthetic oligonucleotide
gggguggucagcggccgggaugccg

SEQ ID NO: 151392 - RNA, 25 nt, Artificial Sequence
  Description of Artificial Sequence: Synthetic oligonucleotide
ggcguggccaagggugccagcaugc

SEQ ID NO: 151393 - RNA, 25 nt, Artificial Sequence
  Description of Artificial Sequence: Synthetic oligonucleotide
cgcagccugcgcgugcucaacugcc

SEQ ID NO: 151394 - RNA, 25 nt, Artificial Sequence
  Description of Artificial Sequence: Synthetic oligonucleotide
caagggaagggcacgguuagcggca

SEQ ID NO: 151395 - RNA, 25 nt, Artificial Sequence
  Description of Artificial Sequence: Synthetic oligonucleotide
acccucauaggccuggaguuuauuc

SEQ ID NO: 151396 - RNA, 25 nt, Artificial Sequence
  Description of Artificial Sequence: Synthetic oligonucleotide
cggaaaagccagcugguccagccug

SEQ ID NO: 151397 - RNA, 25 nt, Artificial Sequence
  Description of Artificial Sequence: Synthetic oligonucleotide
guggggccacugguggugcugcugc

SEQ ID NO: 151398 - RNA, 25 nt, Artificial Sequence
  Description of Artificial Sequence: Synthetic oligonucleotide
ccccuggcggguggguacagccgcg

SEQ ID NO: 151399 - RNA, 25 nt, Artificial Sequence
  Description of Artificial Sequence: Synthetic oligonucleotide
guccucaacgccgccugccagcgcc

SEQ ID NO: 151400 - RNA, 25 nt, Artificial Sequence
  Description of Artificial Sequence: Synthetic oligonucleotide
cuggcgagggcuggggucgugcugg

SEQ ID NO: 151401 - RNA, 25 nt, Artificial Sequence
  Description of Artificial Sequence: Synthetic oligonucleotide
gucaccgcugccggcaacuuccggg

SEQ ID NO: 151402 - RNA, 25 nt, Artificial Sequence
  Description of Artificial Sequence: Synthetic oligonucleotide
gacgaugccugccucuacuccccag

SEQ ID NO: 151403 - RNA, 25 nt, Artificial Sequence
  Description of Artificial Sequence: Synthetic oligonucleotide
gccucagcucccgaggucaucacag

SEQ ID NO: 151404 - RNA, 25 nt, Artificial Sequence
  Description of Artificial Sequence: Synthetic oligonucleotide
guuggggccaccaaugcccaagacc

SEQ ID NO: 151405 - RNA, 25 nt, Artificial Sequence
  Description of Artificial Sequence: Synthetic oligonucleotide
cagccggugacccuggggacuuugg

SEQ ID NO: 151406 - RNA, 25 nt, Artificial Sequence
  Description of Artificial Sequence: Synthetic oligonucleotide
gggaccaacuuuggccgcugugugg

SEQ ID NO: 151407 - RNA, 25 nt, Artificial Sequence
  Description of Artificial Sequence: Synthetic oligonucleotide
gaccucuuugccccaggggaggaca

SEQ ID NO: 151408 - RNA, 25 nt, Artificial Sequence
  Description of Artificial Sequence: Synthetic oligonucleotide
aucauuggugccuccagcgacugca

SEQ ID NO: 151409 - RNA, 25 nt, Artificial Sequence
  Description of Artificial Sequence: Synthetic oligonucleotide
agcaccugcuuugugucacagagug

SEQ ID NO: 151410 - RNA, 25 nt, Artificial Sequence
  Description of Artificial Sequence: Synthetic oligonucleotide
gggacaucacaggcugcugcccacg

SEQ ID NO: 151411 - RNA, 25 nt, Artificial Sequence
  Description of Artificial Sequence: Synthetic oligonucleotide
guggcuggcauugcagccaugaugc

SEQ ID NO: 151412 - RNA, 25 nt, Artificial Sequence
  Description of Artificial Sequence: Synthetic oligonucleotide
cugucugccgagccggagcucaccc

SEQ ID NO: 151413 - RNA, 25 nt, Artificial Sequence
  Description of Artificial Sequence: Synthetic oligonucleotide
cuggccgaguugaggcagagacuga

SEQ ID NO: 151414 - RNA, 25 nt, Artificial Sequence
  Description of Artificial Sequence: Synthetic oligonucleotide
auccacuucucugccaaagauguca

SEQ ID NO: 151415 - RNA, 25 nt, Artificial Sequence
  Description of Artificial Sequence: Synthetic oligonucleotide
aucaaugaggccugguucccugagg

SEQ ID NO: 151416 - RNA, 25 nt, Artificial Sequence
  Description of Artificial Sequence: Synthetic oligonucleotide
gaccagcggguacugacccccaacc

SEQ ID NO: 151417 - RNA, 25 nt, Artificial Sequence
  Description of Artificial Sequence: Synthetic oligonucleotide
cugguggccgcccugccccccagca

SEQ ID NO: 151418 - RNA, 25 nt, Artificial Sequence
  Description of Artificial Sequence: Synthetic oligonucleotide
acccauggggcagguuggcagcugu

SEQ ID NO: 151419 - RNA, 25 nt, Artificial Sequence
  Description of Artificial Sequence: Synthetic oligonucleotide
uuuugcaggacuguauggucagcac

SEQ ID NO: 151420 - RNA, 25 nt, Artificial Sequence
  Description of Artificial Sequence: Synthetic oligonucleotide
cacucggggccuacacggauggcca

SEQ ID NO: 151421 - RNA, 25 nt, Artificial Sequence
  Description of Artificial Sequence: Synthetic oligonucleotide
acagccgucgcccgcugcgccccag

SEQ ID NO: 151422 - RNA, 25 nt, Artificial Sequence
  Description of Artificial Sequence: Synthetic oligonucleotide
gaugaggagcugcugagcugcucca

SEQ ID NO: 151423 - RNA, 25 nt, Artificial Sequence
  Description of Artificial Sequence: Synthetic oligonucleotide
aguuucuccaggagugggaagcggc

SEQ ID NO: 151424 - RNA, 25 nt, Artificial Sequence
  Description of Artificial Sequence: Synthetic oligonucleotide
cggggcgagcgcauggaggcccaag

SEQ ID NO: 151425 - RNA, 25 nt, Artificial Sequence
  Description of Artificial Sequence: Synthetic oligonucleotide
gggggcaagcuggucugccgggccc

SEQ ID NO: 151426 - RNA, 25 nt, Artificial Sequence
  Description of Artificial Sequence: Synthetic oligonucleotide
cacaacgcuuuugggggugagggug

SEQ ID NO: 151427 - RNA, 25 nt, Artificial Sequence
  Description of Artificial Sequence: Synthetic oligonucleotide
gucuacgccauugccaggugcugcc

SEQ ID NO: 151428 - RNA, 25 nt, Artificial Sequence
  Description of Artificial Sequence: Synthetic oligonucleotide
cugcuaccccaggccaacugcagcg

SEQ ID NO: 151429 - RNA, 25 nt, Artificial Sequence
  Description of Artificial Sequence: Synthetic oligonucleotide
guccacacagcuccaccagcugagg

SEQ ID NO: 151430 - RNA, 25 nt, Artificial Sequence
  Description of Artificial Sequence: Synthetic oligonucleotide
gccagcauggggacccguguccacu

SEQ ID NO: 151431 - RNA, 25 nt, Artificial Sequence
  Description of Artificial Sequence: Synthetic oligonucleotide
ugccaccaacagggccacguccuca

SEQ ID NO: 151432 - RNA, 25 nt, Artificial Sequence
  Description of Artificial Sequence: Synthetic oligonucleotide
acaggcugcagcucccacugggagg

SEQ ID NO: 151433 - RNA, 25 nt, Artificial Sequence
  Description of Artificial Sequence: Synthetic oligonucleotide
guggaggaccuuggcacccacaagc

SEQ ID NO: 151434 - RNA, 25 nt, Artificial Sequence
  Description of Artificial Sequence: Synthetic oligonucleotide
ccgccugugcugaggccacgagguc

SEQ ID NO: 151435 - RNA, 25 nt, Artificial Sequence
  Description of Artificial Sequence: Synthetic oligonucleotide
cagcccaaccagugcgugggccaca

SEQ ID NO: 151436 - RNA, 25 nt, Artificial Sequence
  Description of Artificial Sequence: Synthetic oligonucleotide
agggaggccagcauccacgcuuccu

SEQ ID NO: 151437 - RNA, 25 nt, Artificial Sequence
  Description of Artificial Sequence: Synthetic oligonucleotide
ugcugccaugccccaggucuggaau

SEQ ID NO: 151438 - RNA, 25 nt, Artificial Sequence
  Description of Artificial Sequence: Synthetic oligonucleotide
ugcaaagucaaggagcauggaaucc

SEQ ID NO: 151439 - RNA, 25 nt, Artificial Sequence
  Description of Artificial Sequence: Synthetic oligonucleotide
ccggccccucaggagcaggugaccg

SEQ ID NO: 151440 - RNA, 25 nt, Artificial Sequence
  Description of Artificial Sequence: Synthetic oligonucleotide
guggccugcgaggagggcuggaccc

SEQ ID NO: 151441 - RNA, 25 nt, Artificial Sequence
  Description of Artificial Sequence: Synthetic oligonucleotide
cugacuggcugcagugcccucccug

SEQ ID NO: 151442 - RNA, 25 nt, Artificial Sequence
  Description of Artificial Sequence: Synthetic oligonucleotide
gggaccucccacguccugggggccu

SEQ ID NO: 151443 - RNA, 25 nt, Artificial Sequence
  Description of Artificial Sequence: Synthetic oligonucleotide
uacgccguagacaacacguguguag

SEQ ID NO: 151444 - RNA, 25 nt, Artificial Sequence
  Description of Artificial Sequence: Synthetic oligonucleotide
gucaggagccgggacgucagcacua

SEQ ID NO: 151445 - RNA, 25 nt, Artificial Sequence
  Description of Artificial Sequence: Synthetic oligonucleotide
acaggcagcaccagcgaaggggccg

SEQ ID NO: 151446 - RNA, 25 nt, Artificial Sequence
  Description of Artificial Sequence: Synthetic oligonucleotide
gugacagccguugccaucugcugcc

SEQ ID NO: 151447 - RNA, 25 nt, Artificial Sequence
  Description of Artificial Sequence: Synthetic oligonucleotide
cggagccggcaccuggcgcaggccu

SEQ ID NO: 151448 - RNA, 25 nt, Artificial Sequence
  Description of Artificial Sequence: Synthetic oligonucleotide
ucccaggagcuccagugacagcccc

SEQ ID NO: 151449 - RNA, 25 nt, Artificial Sequence
  Description of Artificial Sequence: Synthetic oligonucleotide
caucccaggaugggugucuggggag

SEQ ID NO: 151450 - RNA, 25 nt, Artificial Sequence
  Description of Artificial Sequence: Synthetic oligonucleotide
gggucaagggcuggggcugagcuuu

SEQ ID NO: 151451 - RNA, 25 nt, Artificial Sequence
  Description of Artificial Sequence: Synthetic oligonucleotide
uaaaaugguuccgacuugucccucu

SEQ ID NO: 151452 - RNA, 25 nt, Artificial Sequence
  Description of Artificial Sequence: Synthetic oligonucleotide
ucucagcccuccauggccuggcacg

SEQ ID NO: 151453 - RNA, 25 nt, Artificial Sequence
  Description of Artificial Sequence: Synthetic oligonucleotide
gaggggauggggaugcuuccgccuu

SEQ ID NO: 151454 - RNA, 25 nt, Artificial Sequence
  Description of Artificial Sequence: Synthetic oligonucleotide
uuccggggcugcuggccuggcccuu

SEQ ID NO: 151455 - RNA, 25 nt, Artificial Sequence
  Description of Artificial Sequence: Synthetic oligonucleotide
ugaguggggcagccuccuugccugg

SEQ ID NO: 151456 - RNA, 25 nt, Artificial Sequence
  Description of Artificial Sequence: Synthetic oligonucleotide
gaacucacucacucugggugccucc

SEQ ID NO: 151457 - RNA, 25 nt, Artificial Sequence
  Description of Artificial Sequence: Synthetic oligonucleotide
cuccccagguggaggugccaggaag

SEQ ID NO: 151458 - RNA, 25 nt, Artificial Sequence
  Description of Artificial Sequence: Synthetic oligonucleotide
gcucccucccucacuguggggcauu

SEQ ID NO: 151459 - RNA, 25 nt, Artificial Sequence
  Description of Artificial Sequence: Synthetic oligonucleotide
uucaccauucaaacaggucgagcug

SEQ ID NO: 151460 - RNA, 25 nt, Artificial Sequence
  Description of Artificial Sequence: Synthetic oligonucleotide
gugcucgggugcugccagcugcucc

SEQ ID NO: 151461 - RNA, 25 nt, Artificial Sequence
  Description of Artificial Sequence: Synthetic oligonucleotide
ccaaugugccgauguccgugggcag

SEQ ID NO: 151462 - RNA, 25 nt, Artificial Sequence
  Description of Artificial Sequence: Synthetic oligonucleotide
gaaugacuuuuauugagcucuuguu

SEQ ID NO: 151463 - RNA, 25 nt, Artificial Sequence
  Description of Artificial Sequence: Synthetic oligonucleotide
uccgugccaggcauucaauccucag

SEQ ID NO: 151464 - RNA, 25 nt, Artificial Sequence
  Description of Artificial Sequence: Synthetic oligonucleotide
ggucuccaccaaggaggcaggauuc

SEQ ID NO: 151465 - RNA, 25 nt, Artificial Sequence
  Description of Artificial Sequence: Synthetic oligonucleotide
cuucccauggauaggggagggggcg

SEQ ID NO: 151466 - RNA, 25 nt, Artificial Sequence
  Description of Artificial Sequence: Synthetic oligonucleotide
gguaggggcugcagggacaaacauc

SEQ ID NO: 151467 - RNA, 25 nt, Artificial Sequence
  Description of Artificial Sequence: Synthetic oligonucleotide
cguuggggggugagugugaaaggug

SEQ ID NO: 151468 - RNA, 25 nt, Artificial Sequence
  Description of Artificial Sequence: Synthetic oligonucleotide
gcugauggcccucaucuccagcuaa

SEQ ID NO: 151469 - RNA, 25 nt, Artificial Sequence
  Description of Artificial Sequence: Synthetic oligonucleotide
acuguggagaagccccugggggcuc

SEQ ID NO: 151470 - RNA, 25 nt, Artificial Sequence
  Description of Artificial Sequence: Synthetic oligonucleotide
cccugauuaauggaggcuuagcuuu

SEQ ID NO: 151471 - RNA, 25 nt, Artificial Sequence
  Description of Artificial Sequence: Synthetic oligonucleotide
ucuggauggcaucuagccagaggcu

SEQ ID NO: 151472 - RNA, 25 nt, Artificial Sequence
  Description of Artificial Sequence: Synthetic oligonucleotide
uggagacaggugcgccccugguggu

SEQ ID NO: 151473 - RNA, 25 nt, Artificial Sequence
  Description of Artificial Sequence: Synthetic oligonucleotide
ucacaggcugugccuugguuuccug

SEQ ID NO: 151474 - RNA, 25 nt, Artificial Sequence
  Description of Artificial Sequence: Synthetic oligonucleotide
gagccaccuuuacucugcucuaugc

SEQ ID NO: 151475 - RNA, 25 nt, Artificial Sequence
  Description of Artificial Sequence: Synthetic oligonucleotide
ccaggcugugcuagcaacacccaaa

SEQ ID NO: 151476 - RNA, 25 nt, Artificial Sequence
  Description of Artificial Sequence: Synthetic oligonucleotide
agguggccugcggggagccaucacc

SEQ ID NO: 151477 - RNA, 25 nt, Artificial Sequence
  Description of Artificial Sequence: Synthetic oligonucleotide
cuaggacugacucggcagugugcag

SEQ ID NO: 151478 - RNA, 25 nt, Artificial Sequence
  Description of Artificial Sequence: Synthetic oligonucleotide
guggugcaugcacugucucagccaa

SEQ ID NO: 151479 - RNA, 25 nt, Artificial Sequence
  Description of Artificial Sequence: Synthetic oligonucleotide
acccgcuccacuacccggcagggua

SEQ ID NO: 151480 - RNA, 25 nt, Artificial Sequence
  Description of Artificial Sequence: Synthetic oligonucleotide
acacauucgcaccccuacuucacag

SEQ ID NO: 151481 - RNA, 25 nt, Artificial Sequence
  Description of Artificial Sequence: Synthetic oligonucleotide
gaggaagaaaccuggaaccagaggg

SEQ ID NO: 151482 - RNA, 25 nt, Artificial Sequence
  Description of Artificial Sequence: Synthetic oligonucleotide
gggcgugccugccaagcucacacag

SEQ ID NO: 151483 - RNA, 25 nt, Artificial Sequence
  Description of Artificial Sequence: Synthetic oligonucleotide
gcaggaacugagccagaaacgcaga

SEQ ID NO: 151484 - RNA, 25 nt, Artificial Sequence
  Description of Artificial Sequence: Synthetic oligonucleotide
auugggcuggcucugaagccaagcc

SEQ ID NO: 151485 - RNA, 25 nt, Artificial Sequence
  Description of Artificial Sequence: Synthetic oligonucleotide
cucuucuuacuucacccggcugggc

SEQ ID NO: 151486 - RNA, 25 nt, Artificial Sequence
  Description of Artificial Sequence: Synthetic oligonucleotide
cuccucauuuuuacggguaacagug

SEQ ID NO: 151487 - RNA, 25 nt, Artificial Sequence
  Description of Artificial Sequence: Synthetic oligonucleotide
gaggcugggaaggggaacacagacc

SEQ ID NO: 151488 - RNA, 25 nt, Artificial Sequence
  Description of Artificial Sequence: Synthetic oligonucleotide
caggaagcucggugagugauggcag

SEQ ID NO: 151489 - RNA, 25 nt, Artificial Sequence
  Description of Artificial Sequence: Synthetic oligonucleotide
gaacgaugccugcaggcauggaacu

SEQ ID NO: 151490 - RNA, 25 nt, Artificial Sequence
  Description of Artificial Sequence: Synthetic oligonucleotide
uuuuuccguuaucacccaggccuga

SEQ ID NO: 151491 - RNA, 25 nt, Artificial Sequence
  Description of Artificial Sequence: Synthetic oligonucleotide
auucacuggccuggcggagaugcuu

SEQ ID NO: 151492 - RNA, 25 nt, Artificial Sequence
  Description of Artificial Sequence: Synthetic oligonucleotide
ucuaaggcauggucgggggagaggg

SEQ ID NO: 151493 - RNA, 25 nt, Artificial Sequence
  Description of Artificial Sequence: Synthetic oligonucleotide
gccaacaacugucccuccuugagca

SEQ ID NO: 151494 - RNA, 25 nt, Artificial Sequence
  Description of Artificial Sequence: Synthetic oligonucleotide
accagccccacccaagcaagcagac

SEQ ID NO: 151495 - RNA, 25 nt, Artificial Sequence
  Description of Artificial Sequence: Synthetic oligonucleotide
cauuuaucuuuugggucuguccucu

SEQ ID NO: 151496 - RNA, 25 nt, Artificial Sequence
  Description of Artificial Sequence: Synthetic oligonucleotide
ucuguugccuuuuuacagccaacuu

SEQ ID NO: 151497 - RNA, 25 nt, Artificial Sequence
  Description of Artificial Sequence: Synthetic oligonucleotide
uuucuagaccuguuuugcuuuugua

SEQ ID NO: 151498 - RNA, 25 nt, Artificial Sequence
  Description of Artificial Sequence: Synthetic oligonucleotide
aacuugaagauauuuauucuggguu

SEQ ID NO: 151499 - RNA, 25 nt, Artificial Sequence
  Description of Artificial Sequence: Synthetic oligonucleotide
uuuguagcauuuuuauuaauauggu

SEQ ID NO: 151500 - RNA, 25 nt, Artificial Sequence
  Description of Artificial Sequence: Synthetic oligonucleotide
ugacuuuuuaaaauaaaaacaaaca

SEQ ID NO: 151501 - RNA, 25 nt, Artificial Sequence
  Description of Artificial Sequence: Synthetic oligonucleotide
aauaaaaacaaacaaacguuguccu

SEQ ID NO: 151502 - DNA, 21 bp, Artificial Sequence
  Description of Artificial Sequence: Synthetic oligonucleotide
  Description of Combined DNA/RNA Molecule: Synthetic oligonucleotide
cuacacaaaucagcgauuutt

SEQ ID NO: 151503 - DNA, 21 bp, Artificial Sequence
  Description of Artificial Sequence: Synthetic oligonucleotide
  Description of Combined DNA/RNA Molecule: Synthetic oligonucleotide
aaaucgcugauuuguguagtt

SEQ ID NO: 151504 - DNA, 25 bp, Artificial Sequence
  Description of Artificial Sequence: Synthetic oligonucleotide
  Description of Combined DNA/RNA Molecule: Synthetic oligonucleotide
cuacacaaaucagcgauuuccaugt

SEQ ID NO: 151505 - RNA, 27 nt, Artificial Sequence
  Description of Artificial Sequence: Synthetic oligonucleotide
acauggaaaucgcugauuuguguaguc

SEQ ID NO: 151506 - RNA, 13 nt, Artificial Sequence
  Description of Artificial Sequence: Synthetic oligonucleotide
cuacacaaaucag

SEQ ID NO: 151507 - DNA, 11 bp, Artificial Sequence
  Description of Artificial Sequence: Synthetic oligonucleotide
  Description of Combined DNA/RNA Molecule: Synthetic oligonucleotide
gauuuccaugt

SEQ ID NO: 151508 - DNA, 21 bp, Artificial Sequence
  Description of Artificial Sequence: Synthetic oligonucleotide
  Description of Combined DNA/RNA Molecule: Synthetic oligonucleotide
ggaucuuauuucuucggagtt

SEQ ID NO: 151509 - DNA, 21 bp, Artificial Sequence
  Description of Artificial Sequence: Synthetic oligonucleotide
  Description of Combined DNA/RNA Molecule: Synthetic oligonucleotide
cuccgaagaaauaagaucctt

SEQ ID NO: 151510 - RNA, 11 nt, Artificial Sequence
  Description of Artificial Sequence: Synthetic oligonucleotide
ggaucuuauuu

SEQ ID NO: 151511 - DNA, 10 bp, Artificial Sequence
  Description of Artificial Sequence: Synthetic oligonucleotide
  Description of Combined DNA/RNA Molecule: Synthetic oligonucleotide
cuucggagtt

SEQ ID NO: 151512 - RNA, 27 nt, Artificial Sequence
  Description of Artificial Sequence: Synthetic oligonucleotide
cauugucuccgaagaaauaagauccuu

SEQ ID NO: 151513 - RNA, 8 nt, Artificial Sequence
  Description of Artificial Sequence: Synthetic oligonucleotide
  modified_base (2): LNA-G
ggaucuua

SEQ ID NO: 151514 - DNA, 17 bp, Artificial Sequence
  Description of Artificial Sequence: Synthetic oligonucleotide
  Description of Combined DNA/RNA Molecule: Synthetic oligonucleotide
uuucuucggagacaatg

SEQ ID NO: 151515 - DNA, 16 bp, Artificial Sequence
  Description of Artificial Sequence: Synthetic oligonucleotide
  Description of Combined DNA/RNA Molecule: Synthetic oligonucleotide
uucuucggagacaatg

SEQ ID NO: 151516 - DNA, 15 bp, Artificial Sequence
  Description of Artificial Sequence: Synthetic oligonucleotide
  Description of Combined DNA/RNA Molecule: Synthetic oligonucleotide
ucuucggagacaatg

SEQ ID NO: 151517 - DNA, 14 bp, Artificial Sequence
  Description of Artificial Sequence: Synthetic oligonucleotide
  Description of Combined DNA/RNA Molecule: Synthetic oligonucleotide
cuucggagacaatg

SEQ ID NO: 151518 - DNA, 13 bp, Artificial Sequence
  Description of Artificial Sequence: Synthetic oligonucleotide
  Description of Combined DNA/RNA Molecule: Synthetic oligonucleotide
uucggagacaatg

SEQ ID NO: 151519 - DNA, 12 bp, Artificial Sequence
  Description of Artificial Sequence: Synthetic oligonucleotide
  Description of Combined DNA/RNA Molecule: Synthetic oligonucleotide
ucggagacaatg

SEQ ID NO: 151520 - DNA, 11 bp, Artificial Sequence
  Description of Artificial Sequence: Synthetic oligonucleotide
  Description of Combined DNA/RNA Molecule: Synthetic oligonucleotide
cggagacaatg

SEQ ID NO: 151521 - RNA, 9 nt, Artificial Sequence
  Description of Artificial Sequence: Synthetic oligonucleotide
  modified_base (2): LNA-G
ggaucuuau

SEQ ID NO: 151522 - RNA, 10 nt, Artificial Sequence
  Description of Artificial Sequence: Synthetic oligonucleotide
  modified_base (2): LNA-G
ggaucuuauu

SEQ ID NO: 151523 - RNA, 11 nt, Artificial Sequence
  Description of Artificial Sequence: Synthetic oligonucleotide
  modified_base (2): LNA-G
ggaucuuauuu

SEQ ID NO: 151524 - RNA, 12 nt, Artificial Sequence
  Description of Artificial Sequence: Synthetic oligonucleotide
  modified_base (2): LNA-G
ggaucuuauuuc

SEQ ID NO: 151525 - RNA, 8 nt, Artificial Sequence
  Description of Artificial Sequence: Synthetic oligonucleotide
  modified_base (3): LNA-A
cuacacaa

SEQ ID NO: 151526 - DNA, 13 bp, Artificial Sequence
  Description of Artificial Sequence: Synthetic oligonucleotide
  Description of Combined DNA/RNA Molecule: Synthetic oligonucleotide
  modified_base (8): LNA-A
aucagcgauuutt

SEQ ID NO: 151527 - DNA, 12 bp, Artificial Sequence
  Description of Artificial Sequence: Synthetic oligonucleotide
  Description of Combined DNA/RNA Molecule: Synthetic oligonucleotide
  modified_base (7): LNA-A
ucagcgauuutt

SEQ ID NO: 151528 - DNA, 11 bp, Artificial Sequence
  Description of Artificial Sequence: Synthetic oligonucleotide
  Description of Combined DNA/RNA Molecule: Synthetic oligonucleotide
  modified_base (6): LNA-A
cagcgauuutt

SEQ ID NO: 151529 - DNA, 10 bp, Artificial Sequence
  Description of Artificial Sequence: Synthetic oligonucleotide
  Description of Combined DNA/RNA Molecule: Synthetic oligonucleotide
  modified_base (5): LNA-A
agcgauuutt

SEQ ID NO: 151530 - DNA, 9 bp, Artificial Sequence
  Description of Artificial Sequence: Synthetic oligonucleotide
  Description of Combined DNA/RNA Molecule: Synthetic oligonucleotide
  modified_base (4): LNA-A
gcgauuutt

SEQ ID NO: 151531 - DNA, 8 bp, Artificial Sequence
  Description of Artificial Sequence: Synthetic oligonucleotide
  Description of Combined DNA/RNA Molecule: Synthetic oligonucleotide
  modified_base (3): LNA-A
cgauuutt

SEQ ID NO: 151532 - DNA, 7 bp, Artificial Sequence
  Description of Artificial Sequence: Synthetic oligonucleotide
  Description of Combined DNA/RNA Molecule: Synthetic oligonucleotide
  modified_base (2): LNA-A
gauuutt

SEQ ID NO: 151533 - RNA, 9 nt, Artificial Sequence
  Description of Artificial Sequence: Synthetic oligonucleotide
  modified_base (3): LNA-A
cuacacaaa

SEQ ID NO: 151534 - RNA, 10 nt, Artificial Sequence
  Description of Artificial Sequence: Synthetic oligonucleotide
  modified_base (3): LNA-A
cuacacaaau

SEQ ID NO: 151535 - RNA, 11 nt, Artificial Sequence
  Description of Artificial Sequence: Synthetic oligonucleotide
  modified_base (3): LNA-A
cuacacaaauc

SEQ ID NO: 151536 - RNA, 12 nt, Artificial Sequence
  Description of Artificial Sequence: Synthetic oligonucleotide
  modified_base (3): LNA-A
cuacacaaauca

SEQ ID NO: 151537 - RNA, 13 nt, Artificial Sequence
  Description of Artificial Sequence: Synthetic oligonucleotide
  modified_base (3): LNA-A
cuacacaaaucag

SEQ ID NO: 151538 - RNA, 14 nt, Artificial Sequence
  Description of Artificial Sequence: Synthetic oligonucleotide
cuacacaaaucagc

SEQ ID NO: 151539 - RNA, 13 nt, Artificial Sequence
  Description of Artificial Sequence: Synthetic oligonucleotide
  modified_base (2): LNA-G
ggaucuuauuucu

SEQ ID NO: 151540 - RNA, 14 nt, Artificial Sequence
  Description of Artificial Sequence: Synthetic oligonucleotide
  modified_base (2): LNA-G
ggaucuuauuucuu

SEQ ID NO: 151541 - RNA, 8 nt, Artificial Sequence
  Description of Artificial Sequence: Synthetic oligonucleotide
  modified_base (2): LNA-G
  modified_base (8): LNA-A
ggaucuua

SEQ ID NO: 151542 - RNA, 9 nt, Artificial Sequence
  Description of Artificial Sequence: Synthetic oligonucleotide
  modified_base (2): LNA-G
  modified_base (9): LNA-U
ggaucuuau

SEQ ID NO: 151543 - RNA, 10 nt, Artificial Sequence
  Description of Artificial Sequence: Synthetic oligonucleotide
  modified_base (2): LNA-G
  modified_base (10): LNA-U
ggaucuuauu

SEQ ID NO: 151544 - RNA, 11 nt, Artificial Sequence
  Description of Artificial Sequence: Synthetic oligonucleotide
  modified_base (2): LNA-G
  modified_base (11): LNA-U
ggaucuuauuu

SEQ ID NO: 151545 - RNA, 12 nt, Artificial Sequence
  Description of Artificial Sequence: Synthetic oligonucleotide
  modified_base (2): LNA-G
  modified_base (12): LNA-C
ggaucuuauuuc

SEQ ID NO: 151546 - RNA, 13 nt, Artificial Sequence
  Description of Artificial Sequence: Synthetic oligonucleotide
  modified_base (2): LNA-G
  modified_base (13): LNA-U
ggaucuuauuucu

SEQ ID NO: 151547 - RNA, 14 nt, Artificial Sequence
  Description of Artificial Sequence: Synthetic oligonucleotide
  modified_base (2): LNA-G
  modified_base (14): LNA-U
ggaucuuauuucuu

SEQ ID NO: 151548 - DNA, 13 bp, Artificial Sequence
  Description of Artificial Sequence: Synthetic oligonucleotide
  Description of Combined DNA/RNA Molecule: Synthetic oligonucleotide
  modified_base (8): LNA-G
uuucuucggagtt

SEQ ID NO: 151549 - DNA, 12 bp, Artificial Sequence
  Description of Artificial Sequence: Synthetic oligonucleotide
  Description of Combined DNA/RNA Molecule: Synthetic oligonucleotide
  modified_base (7): LNA-G
uucuucggagtt

SEQ ID NO: 151550 - DNA, 11 bp, Artificial Sequence
  Description of Artificial Sequence: Synthetic oligonucleotide
  Description of Combined DNA/RNA Molecule: Synthetic oligonucleotide
  modified_base (6): LNA-G
ucuucggagtt

SEQ ID NO: 151551 - DNA, 10 bp, Artificial Sequence
  Description of Artificial Sequence: Synthetic oligonucleotide
  Description of Combined DNA/RNA Molecule: Synthetic oligonucleotide
  modified_base (5): LNA-G
cuucggagtt

SEQ ID NO: 151552 - DNA, 9 bp, Artificial Sequence
  Description of Artificial Sequence: Synthetic oligonucleotide
  Description of Combined DNA/RNA Molecule: Synthetic oligonucleotide
  modified_base (4): LNA-G
uucggagtt

SEQ ID NO: 151553 - DNA, 8 bp, Artificial Sequence
  Description of Artificial Sequence: Synthetic oligonucleotide
  Description of Combined DNA/RNA Molecule: Synthetic oligonucleotide
  modified_base (3): LNA-G
ucggagtt

SEQ ID NO: 151554 - DNA, 7 bp, Artificial Sequence
  Description of Artificial Sequence: Synthetic oligonucleotide
  Description of Combined DNA/RNA Molecule: Synthetic oligonucleotide
  modified_base (2): LNA-G
cggagtt

SEQ ID NO: 151555 - DNA, 13 bp, Artificial Sequence
  Description of Artificial Sequence: Synthetic oligonucleotide
  Description of Combined DNA/RNA Molecule: Synthetic oligonucleotide
  modified_base (1): LNA-U
  modified_base (8): LNA-G
uuucuucggagtt

SEQ ID NO: 151556 - DNA, 12 bp, Artificial Sequence
  Description of Artificial Sequence: Synthetic oligonucleotide
  Description of Combined DNA/RNA Molecule: Synthetic oligonucleotide
  modified_base (1): LNA-U
  modified_base (7): LNA-G
uucuucggagtt

SEQ ID NO: 151557 - DNA, 11 bp, Artificial Sequence
  Description of Artificial Sequence: Synthetic oligonucleotide
  Description of Combined DNA/RNA Molecule: Synthetic oligonucleotide
  modified_base (1): LNA-U
  modified_base (6): LNA-G
ucuucggagtt

SEQ ID NO: 151558 - DNA, 10 bp, Artificial Sequence
  Description of Artificial Sequence: Synthetic oligonucleotide
  Description of Combined DNA/RNA Molecule: Synthetic oligonucleotide
  modified_base (1): LNA-C
  modified_base (5): LNA-G
cuucggagtt

SEQ ID NO: 151559 - DNA, 9 bp, Artificial Sequence
  Description of Artificial Sequence: Synthetic oligonucleotide
  Description of Combined DNA/RNA Molecule: Synthetic oligonucleotide
  modified_base (1): LNA-U
  modified_base (4): LNA-G
uucggagtt

SEQ ID NO: 151560 - DNA, 8 bp, Artificial Sequence
  Description of Artificial Sequence: Synthetic oligonucleotide
  Description of Combined DNA/RNA Molecule: Synthetic oligonucleotide
  modified_base (1): LNA-U
  modified_base (3): LNA-G
ucggagtt

SEQ ID NO: 151561 - DNA, 7 bp, Artificial Sequence
  Description of Artificial Sequence: Synthetic oligonucleotide
  Description of Combined DNA/RNA Molecule: Synthetic oligonucleotide
  modified_base (1): LNA-C
  modified_base (2): LNA-G
cggagtt

SEQ ID NO: 151562 - DNA, 21 bp, Artificial Sequence
  Description of Artificial Sequence: Synthetic oligonucleotide
  Description of Combined DNA/RNA Molecule: Synthetic oligonucleotide
  modified_base (2): LNA-G
  modified_base (16): LNA-G
ggaucuuauuucuucggagtt

SEQ ID NO: 151563 - DNA, 25 bp, Artificial Sequence
  Description of Artificial Sequence: Synthetic oligonucleotide
  Description of Combined DNA/RNA Molecule: Synthetic oligonucleotide
ggaucuuauuucuucggagacaatg

SEQ ID NO: 151564 - RNA, 25 nt, Artificial Sequence
  Description of Artificial Sequence: Synthetic oligonucleotide
guauuuugaugaggaguucacggcc

SEQ ID NO: 151565 - RNA, 25 nt, Artificial Sequence
  Description of Artificial Sequence: Synthetic oligonucleotide
ggcccagaugaucaccaucacacca

SEQ ID NO: 151566 - RNA, 25 nt, Artificial Sequence
  Description of Artificial Sequence: Synthetic oligonucleotide
gggaagaaaacuauccugcggguuu

SEQ ID NO: 151567 - RNA, 25 nt, Artificial Sequence
  Description of Artificial Sequence: Synthetic oligonucleotide
guuuuaauuuauuucauccaguuug

SEQ ID NO: 151568 - RNA, 25 nt, Artificial Sequence
  Description of Artificial Sequence: Synthetic oligonucleotide
acguagggaaauguuaaggacuucu

SEQ ID NO: 151569 - RNA, 25 nt, Artificial Sequence
  Description of Artificial Sequence: Synthetic oligonucleotide
ccaggguuuacccagugggacagag

SEQ ID NO: 151570 - RNA, 25 nt, Artificial Sequence
  Description of Artificial Sequence: Synthetic oligonucleotide
agcaagguuuaaauuuguuauugug

SEQ ID NO: 151571 - RNA, 25 nt, Artificial Sequence
  Description of Artificial Sequence: Synthetic oligonucleotide
uguauuauguuguucaaaugcauuu

SEQ ID NO: 151572 - RNA, 25 nt, Artificial Sequence
  Description of Artificial Sequence: Synthetic oligonucleotide
uuuuaaucuuugugacaggaaagcc

SEQ ID NO: 151573 - RNA, 25 nt, Artificial Sequence
  Description of Artificial Sequence: Synthetic oligonucleotide
uuaaucuuugugacaggaaagcccu

SEQ ID NO: 151574 - RNA, 25 nt, Artificial Sequence
  Description of Artificial Sequence: Synthetic oligonucleotide
gcugcuuaugucucccagcauggcc

SEQ ID NO: 151575 - RNA, 25 nt, Artificial Sequence
  Description of Artificial Sequence: Synthetic oligonucleotide
aaguguuucagaagcuucucccuga

SEQ ID NO: 151576 - RNA, 25 nt, Artificial Sequence
  Description of Artificial Sequence: Synthetic oligonucleotide
gaccaucaauaaggaagaagcccuu

SEQ ID NO: 151577 - RNA, 25 nt, Artificial Sequence
  Description of Artificial Sequence: Synthetic oligonucleotide
ccaucaauaaggaagaagcccuuca

SEQ ID NO: 151578 - RNA, 25 nt, Artificial Sequence
  Description of Artificial Sequence: Synthetic oligonucleotide
ucaauaaggaagaagcccuucagcg

SEQ ID NO: 151579 - RNA, 25 nt, Artificial Sequence
  Description of Artificial Sequence: Synthetic oligonucleotide
aauaaggaagaagcccuucagcggc

SEQ ID NO: 151580 - RNA, 25 nt, Artificial Sequence
  Description of Artificial Sequence: Synthetic oligonucleotide
aggaagaagcccuucagcggccagu

SEQ ID NO: 151581 - RNA, 25 nt, Artificial Sequence
  Description of Artificial Sequence: Synthetic oligonucleotide
gcauaacuaaaggugaaaagcuccg

SEQ ID NO: 151582 - RNA, 25 nt, Artificial Sequence
  Description of Artificial Sequence: Synthetic oligonucleotide
cauaacuaaaggugaaaagcuccgg

SEQ ID NO: 151583 - RNA, 25 nt, Artificial Sequence
  Description of Artificial Sequence: Synthetic oligonucleotide
cuacaucacgccagucaacagucug

SEQ ID NO: 151584 - RNA, 25 nt, Artificial Sequence
  Description of Artificial Sequence: Synthetic oligonucleotide
acuggauuuaagcagaguucaaaag

SEQ ID NO: 151585 - RNA, 25 nt, Artificial Sequence
  Description of Artificial Sequence: Synthetic oligonucleotide
cuggauuuaagcagaguucaaaagc

SEQ ID NO: 151586 - RNA, 25 nt, Artificial Sequence
  Description of Artificial Sequence: Synthetic oligonucleotide
gauuuaagcagaguucaaaagcccu

SEQ ID NO: 151587 - RNA, 25 nt, Artificial Sequence
  Description of Artificial Sequence: Synthetic oligonucleotide
auuuaagcagaguucaaaagcccuu

SEQ ID NO: 151588 - RNA, 25 nt, Artificial Sequence
  Description of Artificial Sequence: Synthetic oligonucleotide
uuaagcagaguucaaaagcccuuca

SEQ ID NO: 151589 - RNA, 25 nt, Artificial Sequence
  Description of Artificial Sequence: Synthetic oligonucleotide
uaagcagaguucaaaagcccuucag

SEQ ID NO: 151590 - RNA, 25 nt, Artificial Sequence
  Description of Artificial Sequence: Synthetic oligonucleotide
agcagaguucaaaagcccuucagcg

SEQ ID NO: 151591 - RNA, 25 nt, Artificial Sequence
  Description of Artificial Sequence: Synthetic oligonucleotide
cucagggucugagugaagccgcucg

SEQ ID NO: 151592 - RNA, 25 nt, Artificial Sequence
  Description of Artificial Sequence: Synthetic oligonucleotide
caagcaacuacaucacgccagucaa

SEQ ID NO: 151593 - RNA, 25 nt, Artificial Sequence
  Description of Artificial Sequence: Synthetic oligonucleotide
aucaauggcagcuucuuggugcgug

SEQ ID NO: 151594 - RNA, 25 nt, Artificial Sequence
  Description of Artificial Sequence: Synthetic oligonucleotide
uuccagcccacauuggauucaucag

SEQ ID NO: 151595 - RNA, 25 nt, Artificial Sequence
  Description of Artificial Sequence: Synthetic oligonucleotide
cagcugagaauguggaauaccuaag

SEQ ID NO: 151596 - RNA, 25 nt, Artificial Sequence
  Description of Artificial Sequence: Synthetic oligonucleotide
aacguaucuccuaauuugaggcuca

SEQ ID NO: 151597 - RNA, 25 nt, Artificial Sequence
  Description of Artificial Sequence: Synthetic oligonucleotide
ccuaaaauaauuucucuacaauugg

SEQ ID NO: 151598 - RNA, 25 nt, Artificial Sequence
  Description of Artificial Sequence: Synthetic oligonucleotide
uggaagauucagcuaguuaggagcc

SEQ ID NO: 151599 - RNA, 25 nt, Artificial Sequence
  Description of Artificial Sequence: Synthetic oligonucleotide
uuaaacucuccuagucaauauccac

SEQ ID NO: 151600 - RNA, 25 nt, Artificial Sequence
  Description of Artificial Sequence: Synthetic oligonucleotide
cagccuacaguuauguucagucaca

SEQ ID NO: 151601 - RNA, 25 nt, Artificial Sequence
  Description of Artificial Sequence: Synthetic oligonucleotide
guuauguucagucacacacacauac

SEQ ID NO: 151602 - RNA, 25 nt, Artificial Sequence
  Description of Artificial Sequence: Synthetic oligonucleotide
cacauacaaaauguuccuuuugcuu

SEQ ID NO: 151603 - RNA, 25 nt, Artificial Sequence
  Description of Artificial Sequence: Synthetic oligonucleotide
uccuuuugcuuuuaaaguaauuuuu

SEQ ID NO: 151604 - RNA, 25 nt, Artificial Sequence
  Description of Artificial Sequence: Synthetic oligonucleotide
ugaccugugaagcaacagucaaugg

SEQ ID NO: 151605 - RNA, 25 nt, Artificial Sequence
  Description of Artificial Sequence: Synthetic oligonucleotide
cuaucucacacaucgacaaaccaau

SEQ ID NO: 151606 - RNA, 25 nt, Artificial Sequence
  Description of Artificial Sequence: Synthetic oligonucleotide
uguccucaauuguacugcuaccacu

SEQ ID NO: 151607 - RNA, 25 nt, Artificial Sequence
  Description of Artificial Sequence: Synthetic oligonucleotide
aaaccguagcuggcaagcggucuua

SEQ ID NO: 151608 - RNA, 25 nt, Artificial Sequence
  Description of Artificial Sequence: Synthetic oligonucleotide
uagcuggcaagcggucuuaccggcu

SEQ ID NO: 151609 - RNA, 25 nt, Artificial Sequence
  Description of Artificial Sequence: Synthetic oligonucleotide
uuguaugguuaaaagauggguuacc

SEQ ID NO: 151610 - RNA, 25 nt, Artificial Sequence
  Description of Artificial Sequence: Synthetic oligonucleotide
ugguuaaaagauggguuaccugcga

SEQ ID NO: 151611 - RNA, 25 nt, Artificial Sequence
  Description of Artificial Sequence: Synthetic oligonucleotide
cagggaauuauacaaucuugcugag

SEQ ID NO: 151612 - RNA, 25 nt, Artificial Sequence
  Description of Artificial Sequence: Synthetic oligonucleotide
acaaucuugcugagcauaaaacagu

SEQ ID NO: 151613 - RNA, 25 nt, Artificial Sequence
  Description of Artificial Sequence: Synthetic oligonucleotide
ccaauaaugaagaguccuuuauccu

SEQ ID NO: 151614 - RNA, 25 nt, Artificial Sequence
  Description of Artificial Sequence: Synthetic oligonucleotide
acuuuggauguuccaacgcaaguug

SEQ ID NO: 151615 - RNA, 25 nt, Artificial Sequence
  Description of Artificial Sequence: Synthetic oligonucleotide
aaugcuuccacuaaacugaaaccau

SEQ ID NO: 151616 - RNA, 25 nt, Artificial Sequence
  Description of Artificial Sequence: Synthetic oligonucleotide
gagaaaguuugacuuuguuaaauau

SEQ ID NO: 151617 - RNA, 25 nt, Artificial Sequence
  Description of Artificial Sequence: Synthetic oligonucleotide
aaagaacuacuguauauuaaaaguu

SEQ ID NO: 151618 - RNA, 25 nt, Artificial Sequence
  Description of Artificial Sequence: Synthetic oligonucleotide
uuagaaauacggguuuugacuuaac

SEQ ID NO: 151619 - RNA, 25 nt, Artificial Sequence
  Description of Artificial Sequence: Synthetic oligonucleotide
aacauggguacagcaaacucagcac

SEQ ID NO: 151620 - RNA, 25 nt, Artificial Sequence
  Description of Artificial Sequence: Synthetic oligonucleotide
aaagacacagaagaugcugaccuca

SEQ ID NO: 151621 - RNA, 25 nt, Artificial Sequence
  Description of Artificial Sequence: Synthetic oligonucleotide
uaguagggagguuuauucagaucgc

SEQ ID NO: 151622 - RNA, 25 nt, Artificial Sequence
  Description of Artificial Sequence: Synthetic oligonucleotide
gccuucugcagcaggguucugggau

SEQ ID NO: 151623 - RNA, 25 nt, Artificial Sequence
  Description of Artificial Sequence: Synthetic oligonucleotide
ggucugguacauauuggaaauuaug

SEQ ID NO: 151624 - RNA, 25 nt, Artificial Sequence
  Description of Artificial Sequence: Synthetic oligonucleotide
cuaguccuuccgauggaagcacuag

SEQ ID NO: 151625 - RNA, 25 nt, Artificial Sequence
  Description of Artificial Sequence: Synthetic oligonucleotide
ccagugaauauuguuuuuaugugga

SEQ ID NO: 151626 - RNA, 25 nt, Artificial Sequence
  Description of Artificial Sequence: Synthetic oligonucleotide
augaauucaaguuggaauugguaga

SEQ ID NO: 151627 - RNA, 25 nt, Artificial Sequence
  Description of Artificial Sequence: Synthetic oligonucleotide
caggacacagauuuagacuuggaga

SEQ ID NO: 151628 - RNA, 25 nt, Artificial Sequence
  Description of Artificial Sequence: Synthetic oligonucleotide
cucaaagcacaguuacaguauucca

SEQ ID NO: 151629 - RNA, 25 nt, Artificial Sequence
  Description of Artificial Sequence: Synthetic oligonucleotide
accacugccaccacugaugaauuaa

SEQ ID NO: 151630 - RNA, 25 nt, Artificial Sequence
  Description of Artificial Sequence: Synthetic oligonucleotide
gaaacuacuagugccacaucaucac

SEQ ID NO: 151631 - RNA, 25 nt, Artificial Sequence
  Description of Artificial Sequence: Synthetic oligonucleotide
aagucggacagccucaccaaacaga

SEQ ID NO: 151632 - RNA, 25 nt, Artificial Sequence
  Description of Artificial Sequence: Synthetic oligonucleotide
gaaagcgaaaaauggaacaugaugg

SEQ ID NO: 151633 - RNA, 25 nt, Artificial Sequence
  Description of Artificial Sequence: Synthetic oligonucleotide
cccucugauuuagcauguagacugc

SEQ ID NO: 151634 - RNA, 25 nt, Artificial Sequence
  Description of Artificial Sequence: Synthetic oligonucleotide
ugagcuauuuaaggaucuauuuaug

SEQ ID NO: 151635 - RNA, 25 nt, Artificial Sequence
  Description of Artificial Sequence: Synthetic oligonucleotide
aaaaggugaaaaagcacuauuauca

SEQ ID NO: 151636 - RNA, 25 nt, Artificial Sequence
  Description of Artificial Sequence: Synthetic oligonucleotide
gaaaaagcacuauuaucaguucugc

SEQ ID NO: 151637 - RNA, 25 nt, Artificial Sequence
  Description of Artificial Sequence: Synthetic oligonucleotide
ggcugaaaagaaagauuaaaccuac

SEQ ID NO: 151638 - RNA, 25 nt, Artificial Sequence
  Description of Artificial Sequence: Synthetic oligonucleotide
uaaacccuuauaauaaaauccuucu

SEQ ID NO: 151639 - RNA, 25 nt, Artificial Sequence
  Description of Artificial Sequence: Synthetic oligonucleotide
cauacuauuagccaaugcuguagac

SEQ ID NO: 151640 - RNA, 25 nt, Artificial Sequence
  Description of Artificial Sequence: Synthetic oligonucleotide
gacagaagcauuuugauaggaauag

SEQ ID NO: 151641 - RNA, 25 nt, Artificial Sequence
  Description of Artificial Sequence: Synthetic oligonucleotide
agagcaaauaagauaauggcccuga

SEQ ID NO: 151642 - RNA, 25 nt, Artificial Sequence
  Description of Artificial Sequence: Synthetic oligonucleotide
ccaacauuuuucucuuccucaagca

SEQ ID NO: 151643 - RNA, 25 nt, Artificial Sequence
  Description of Artificial Sequence: Synthetic oligonucleotide
uuaaguaugagaaaaguucagccca

SEQ ID NO: 151644 - RNA, 25 nt, Artificial Sequence
  Description of Artificial Sequence: Synthetic oligonucleotide
caggaauaaagauggcugcugaacc

SEQ ID NO: 151645 - RNA, 25 nt, Artificial Sequence
  Description of Artificial Sequence: Synthetic oligonucleotide
aauuugaaugaccaaguucucuuca

SEQ ID NO: 151646 - RNA, 25 nt, Artificial Sequence
  Description of Artificial Sequence: Synthetic oligonucleotide
auguauaaagauagccagccuagag

SEQ ID NO: 151647 - RNA, 25 nt, Artificial Sequence
  Description of Artificial Sequence: Synthetic oligonucleotide
ggcuguaacuaucucugugaagugu

SEQ ID NO: 151648 - RNA, 25 nt, Artificial Sequence
  Description of Artificial Sequence: Synthetic oligonucleotide
ucugugaagugugagaaaauuucaa

SEQ ID NO: 151649 - RNA, 25 nt, Artificial Sequence
  Description of Artificial Sequence: Synthetic oligonucleotide
ccuuuaaggaaaugaauccuccuga

SEQ ID NO: 151650 - RNA, 25 nt, Artificial Sequence
  Description of Artificial Sequence: Synthetic oligonucleotide
aaggauacaaaaagugacaucauau

SEQ ID NO: 151651 - RNA, 25 nt, Artificial Sequence
  Description of Artificial Sequence: Synthetic oligonucleotide
agaugcaauuugaaucuucaucaua

SEQ ID NO: 151652 - RNA, 25 nt, Artificial Sequence
  Description of Artificial Sequence: Synthetic oligonucleotide
guucaaaacgaagacuagcuauuaa

SEQ ID NO: 151653 - RNA, 25 nt, Artificial Sequence
  Description of Artificial Sequence: Synthetic oligonucleotide
gugaaaccucaucucuacuaaaaau

SEQ ID NO: 151654 - RNA, 25 nt, Artificial Sequence
  Description of Artificial Sequence: Synthetic oligonucleotide
acgaaagagaagcucuaucucgccu

SEQ ID NO: 151655 - RNA, 25 nt, Artificial Sequence
  Description of Artificial Sequence: Synthetic oligonucleotide
cuccacaagcgccuucgguccaguu

SEQ ID NO: 151656 - RNA, 25 nt, Artificial Sequence
  Description of Artificial Sequence: Synthetic oligonucleotide
gagaagauuccaaagauguagccgc

SEQ ID NO: 151657 - RNA, 25 nt, Artificial Sequence
  Description of Artificial Sequence: Synthetic oligonucleotide
aaucuggauucaaugaggagacuug

SEQ ID NO: 151658 - RNA, 25 nt, Artificial Sequence
  Description of Artificial Sequence: Synthetic oligonucleotide
agaacagauuugagaguagugagga

SEQ ID NO: 151659 - RNA, 25 nt, Artificial Sequence
  Description of Artificial Sequence: Synthetic oligonucleotide
ccagagcugugcagaugaguacaaa

SEQ ID NO: 151660 - RNA, 25 nt, Artificial Sequence
  Description of Artificial Sequence: Synthetic oligonucleotide
ccucagauuguuguuguuaaugggc

SEQ ID NO: 151661 - RNA, 25 nt, Artificial Sequence
  Description of Artificial Sequence: Synthetic oligonucleotide
cuauuuuaauuauuuuuaauuuauu

SEQ ID NO: 151662 - RNA, 25 nt, Artificial Sequence
  Description of Artificial Sequence: Synthetic oligonucleotide
uuuaauuuauuaauauuuaaauaug

SEQ ID NO: 151663 - RNA, 25 nt, Artificial Sequence
  Description of Artificial Sequence: Synthetic oligonucleotide
augcaguuugaauauccuuuguuuc

SEQ ID NO: 151664 - RNA, 25 nt, Artificial Sequence
  Description of Artificial Sequence: Synthetic oligonucleotide
caugcugcuggcgucuaaguguuug

SEQ ID NO: 151665 - RNA, 25 nt, Artificial Sequence
  Description of Artificial Sequence: Synthetic oligonucleotide
agaugugcauuucaccugugacaaa

SEQ ID NO: 151666 - RNA, 25 nt, Artificial Sequence
  Description of Artificial Sequence: Synthetic oligonucleotide
ucaaaaccugugccaggcugaauua

SEQ ID NO: 151667 - RNA, 25 nt, Artificial Sequence
  Description of Artificial Sequence: Synthetic oligonucleotide
gaauguggguagucauucuuacaau

SEQ ID NO: 151668 - RNA, 25 nt, Artificial Sequence
  Description of Artificial Sequence: Synthetic oligonucleotide
auguggguagucauucuuacaauug

SEQ ID NO: 151669 - RNA, 25 nt, Artificial Sequence
  Description of Artificial Sequence: Synthetic oligonucleotide
ugaaaaugagcaucagagaguguac

SEQ ID NO: 151670 - RNA, 25 nt, Artificial Sequence
  Description of Artificial Sequence: Synthetic oligonucleotide
uugcuuuucauguagaacucagcag

SEQ ID NO: 151671 - RNA, 25 nt, Artificial Sequence
  Description of Artificial Sequence: Synthetic oligonucleotide
uguauuucuauauuuauuuucagua

SEQ ID NO: 151672 - RNA, 25 nt, Artificial Sequence
  Description of Artificial Sequence: Synthetic oligonucleotide
uuugauuaauguuucuuaaauggaa

SEQ ID NO: 151673 - RNA, 25 nt, Artificial Sequence
  Description of Artificial Sequence: Synthetic oligonucleotide
caacguguauagugccuaaaauugu

SEQ ID NO: 151674 - RNA, 25 nt, Artificial Sequence
  Description of Artificial Sequence: Synthetic oligonucleotide
cauauccuuggcuacuaacaucugg

SEQ ID NO: 151675 - RNA, 25 nt, Artificial Sequence
  Description of Artificial Sequence: Synthetic oligonucleotide
uacuaacaucuggagacugugagcu

SEQ ID NO: 151676 - RNA, 25 nt, Artificial Sequence
  Description of Artificial Sequence: Synthetic oligonucleotide
cauaaguugugugcuuuuuauuaau

SEQ ID NO: 151677 - RNA, 25 nt, Artificial Sequence
  Description of Artificial Sequence: Synthetic oligonucleotide
gcaucauuuuggcucuucuuacauu

SEQ ID NO: 151678 - RNA, 25 nt, Artificial Sequence
  Description of Artificial Sequence: Synthetic oligonucleotide
gcucuucuuacauuuguaaaaaugu

SEQ ID NO: 151679 - RNA, 25 nt, Artificial Sequence
  Description of Artificial Sequence: Synthetic oligonucleotide
agauuaggucaucuuaauucauauu

SEQ ID NO: 151680 - RNA, 25 nt, Artificial Sequence
  Description of Artificial Sequence: Synthetic oligonucleotide
auggaauugaaagaacuaaucauga

SEQ ID NO: 151681 - RNA, 25 nt, Artificial Sequence
  Description of Artificial Sequence: Synthetic oligonucleotide
cacacucauuccuucugcucuuggg

SEQ ID NO: 151682 - RNA, 25 nt, Artificial Sequence
  Description of Artificial Sequence: Synthetic oligonucleotide
uguagagguaaccaguagcuuugag

SEQ ID NO: 151683 - RNA, 25 nt, Artificial Sequence
  Description of Artificial Sequence: Synthetic oligonucleotide
caaccacaugccacguaauauuuca

SEQ ID NO: 151684 - RNA, 25 nt, Artificial Sequence
  Description of Artificial Sequence: Synthetic oligonucleotide
ucggaaacaaguuauucucuucacu

SEQ ID NO: 151685 - RNA, 25 nt, Artificial Sequence
  Description of Artificial Sequence: Synthetic oligonucleotide
acucccaauaacuaaugcuaagaaa

SEQ ID NO: 151686 - RNA, 25 nt, Artificial Sequence
  Description of Artificial Sequence: Synthetic oligonucleotide
aaugcuaagaaaugcugaaaaucaa

SEQ ID NO: 151687 - RNA, 25 nt, Artificial Sequence
  Description of Artificial Sequence: Synthetic oligonucleotide
gucuuucucuaaauaugauuacuuu

SEQ ID NO: 151688 - RNA, 25 nt, Artificial Sequence
  Description of Artificial Sequence: Synthetic oligonucleotide
ugaauuucaggcauuuuguucuaca

SEQ ID NO: 151689 - RNA, 25 nt, Artificial Sequence
  Description of Artificial Sequence: Synthetic oligonucleotide
cgauucccucucacccgggacucuc

SEQ ID NO: 151690 - RNA, 25 nt, Artificial Sequence
  Description of Artificial Sequence: Synthetic oligonucleotide
aggaaagugaaccuuuaaaguaaag

SEQ ID NO: 151691 - RNA, 25 nt, Artificial Sequence
  Description of Artificial Sequence: Synthetic oligonucleotide
gaggcugcaugcucuggaagccugg

SEQ ID NO: 151692 - RNA, 25 nt, Artificial Sequence
  Description of Artificial Sequence: Synthetic oligonucleotide
ucucugaacagaaaacaaaagagag

SEQ ID NO: 151693 - RNA, 25 nt, Artificial Sequence
  Description of Artificial Sequence: Synthetic oligonucleotide
aacuuggcuguaaucaguuaugccg

SEQ ID NO: 151694 - RNA, 25 nt, Artificial Sequence
  Description of Artificial Sequence: Synthetic oligonucleotide
agaagccaaaauuaaaagaagucca

SEQ ID NO: 151695 - RNA, 25 nt, Artificial Sequence
  Description of Artificial Sequence: Synthetic oligonucleotide
auuaaaagaaguccaggugagguua

SEQ ID NO: 151696 - RNA, 25 nt, Artificial Sequence
  Description of Artificial Sequence: Synthetic oligonucleotide
gaauccggauuaucgggaagaggac

SEQ ID NO: 151697 - RNA, 25 nt, Artificial Sequence
  Description of Artificial Sequence: Synthetic oligonucleotide
aaugugacaucaaagcaaguauugu

SEQ ID NO: 151698 - RNA, 25 nt, Artificial Sequence
  Description of Artificial Sequence: Synthetic oligonucleotide
caucaaagcaaguauuguagcacuc

SEQ ID NO: 151699 - RNA, 25 nt, Artificial Sequence
  Description of Artificial Sequence: Synthetic oligonucleotide
agagagagaaaacaaaaccacaaau

SEQ ID NO: 151700 - RNA, 25 nt, Artificial Sequence
  Description of Artificial Sequence: Synthetic oligonucleotide
ucgcuguaguauuuaagcccauaca

SEQ ID NO: 151701 - RNA, 25 nt, Artificial Sequence
  Description of Artificial Sequence: Synthetic oligonucleotide
cgcuguaguauuuaagcccauacag

SEQ ID NO: 151702 - RNA, 25 nt, Artificial Sequence
  Description of Artificial Sequence: Synthetic oligonucleotide
auuuaagcccauacagaaaccuucc

SEQ ID NO: 151703 - RNA, 25 nt, Artificial Sequence
  Description of Artificial Sequence: Synthetic oligonucleotide
auuaaaauaaacaugguauaccuac

SEQ ID NO: 151704 - RNA, 25 nt, Artificial Sequence
  Description of Artificial Sequence: Synthetic oligonucleotide
cuguucugaucggccaguuuucgga

SEQ ID NO: 151705 - RNA, 25 nt, Artificial Sequence
  Description of Artificial Sequence: Synthetic oligonucleotide
aaauaauuugaacuuuggaacaggg

SEQ ID NO: 151706 - RNA, 25 nt, Artificial Sequence
  Description of Artificial Sequence: Synthetic oligonucleotide
ugcgaccuuaauuuaacuuuccagu

SEQ ID NO: 151707 - RNA, 25 nt, Artificial Sequence
  Description of Artificial Sequence: Synthetic oligonucleotide
cugagaaagcuaaaguuugguuuug

SEQ ID NO: 151708 - RNA, 25 nt, Artificial Sequence
  Description of Artificial Sequence: Synthetic oligonucleotide
aguaaagaugcuacuucccacugua

SEQ ID NO: 151709 - RNA, 25 nt, Artificial Sequence
  Description of Artificial Sequence: Synthetic oligonucleotide
cugcuuaauugcugauaccauauga

SEQ ID NO: 151710 - RNA, 25 nt, Artificial Sequence
  Description of Artificial Sequence: Synthetic oligonucleotide
uaccauaugaaugaaacaugggcug

SEQ ID NO: 151711 - RNA, 25 nt, Artificial Sequence
  Description of Artificial Sequence: Synthetic oligonucleotide
aacuuucuuauccaacuuuuucaua

SEQ ID NO: 151712 - RNA, 25 nt, Artificial Sequence
  Description of Artificial Sequence: Synthetic oligonucleotide
ccuugcaugacaucaugaggccgga

SEQ ID NO: 151713 - RNA, 25 nt, Artificial Sequence
  Description of Artificial Sequence: Synthetic oligonucleotide
ugaauuuguauaugacugcauuugu

SEQ ID NO: 151714 - RNA, 25 nt, Artificial Sequence
  Description of Artificial Sequence: Synthetic oligonucleotide
gaauccuaguagaauguuuacuacc

SEQ ID NO: 151715 - RNA, 25 nt, Artificial Sequence
  Description of Artificial Sequence: Synthetic oligonucleotide
gaaagggaagaauuuuuugaugaaa

SEQ ID NO: 151716 - RNA, 25 nt, Artificial Sequence
  Description of Artificial Sequence: Synthetic oligonucleotide
uaucggcaugccagugugugaauuu

SEQ ID NO: 151717 - RNA, 25 nt, Artificial Sequence
  Description of Artificial Sequence: Synthetic oligonucleotide
caccucauaguagagcaauguaugu

SEQ ID NO: 151718 - RNA, 25 nt, Artificial Sequence
  Description of Artificial Sequence: Synthetic oligonucleotide
ccagaauugccaaagcacauauaua

SEQ ID NO: 151719 - RNA, 25 nt, Artificial Sequence
  Description of Artificial Sequence: Synthetic oligonucleotide
uggugaucuggguaauaguuucucc

SEQ ID NO: 151720 - RNA, 25 nt, Artificial Sequence
  Description of Artificial Sequence: Synthetic oligonucleotide
gaucuggguaauaguuucuccaaau

SEQ ID NO: 151721 - RNA, 25 nt, Artificial Sequence
  Description of Artificial Sequence: Synthetic oligonucleotide
ggaugugaugaauacuuccuagaaa

SEQ ID NO: 151722 - RNA, 25 nt, Artificial Sequence
  Description of Artificial Sequence: Synthetic oligonucleotide
cauuuccacagcuacaccauauaug

SEQ ID NO: 151723 - RNA, 25 nt, Artificial Sequence
  Description of Artificial Sequence: Synthetic oligonucleotide
acagcuacaccauauaugaauggag

SEQ ID NO: 151724 - RNA, 25 nt, Artificial Sequence
  Description of Artificial Sequence: Synthetic oligonucleotide
ugcaguucuuacacgagaagaagau

SEQ ID NO: 151725 - RNA, 25 nt, Artificial Sequence
  Description of Artificial Sequence: Synthetic oligonucleotide
acgagaagaagaucauuuacaggga

SEQ ID NO: 151726 - RNA, 25 nt, Artificial Sequence
  Description of Artificial Sequence: Synthetic oligonucleotide
cgagaagaagaucauuuacagggac

SEQ ID NO: 151727 - RNA, 25 nt, Artificial Sequence
  Description of Artificial Sequence: Synthetic oligonucleotide
aagaagaucauuuacagggaccuga

SEQ ID NO: 151728 - RNA, 25 nt, Artificial Sequence
  Description of Artificial Sequence: Synthetic oligonucleotide
agaggaagagguguuugacugcauc

SEQ ID NO: 151729 - RNA, 25 nt, Artificial Sequence
  Description of Artificial Sequence: Synthetic oligonucleotide
gaggaagagguguuugacugcaucg

SEQ ID NO: 151730 - RNA, 25 nt, Artificial Sequence
  Description of Artificial Sequence: Synthetic oligonucleotide
cuacuuugagggcgaguucacaggg

SEQ ID NO: 151731 - RNA, 25 nt, Artificial Sequence
  Description of Artificial Sequence: Synthetic oligonucleotide
agggcaucuccuggcaccucugucc

SEQ ID NO: 151732 - RNA, 25 nt, Artificial Sequence
  Description of Artificial Sequence: Synthetic oligonucleotide
ggagugauaugguuugucuuuuuaa

SEQ ID NO: 151733 - RNA, 25 nt, Artificial Sequence
  Description of Artificial Sequence: Synthetic oligonucleotide
gagugauaugguuugucuuuuuaag

SEQ ID NO: 151734 - RNA, 25 nt, Artificial Sequence
  Description of Artificial Sequence: Synthetic oligonucleotide
ugcaguaaagauccuaaagguuguc

SEQ ID NO: 151735 - RNA, 25 nt, Artificial Sequence
  Description of Artificial Sequence: Synthetic oligonucleotide
aguaaagauccuaaagguugucgac

SEQ ID NO: 151736 - RNA, 25 nt, Artificial Sequence
  Description of Artificial Sequence: Synthetic oligonucleotide
ugacaaaggacaaccuggcaauugu

SEQ ID NO: 151737 - RNA, 25 nt, Artificial Sequence
  Description of Artificial Sequence: Synthetic oligonucleotide
gcaauugugacccaguggugcgagg

SEQ ID NO: 151738 - RNA, 25 nt, Artificial Sequence
  Description of Artificial Sequence: Synthetic oligonucleotide
aacaucauccauagagacaugaaau

SEQ ID NO: 151739 - RNA, 25 nt, Artificial Sequence
  Description of Artificial Sequence: Synthetic oligonucleotide
ugaaauccaacaauauauuucucca

SEQ ID NO: 151740 - RNA, 25 nt, Artificial Sequence
  Description of Artificial Sequence: Synthetic oligonucleotide
aacaauauauuucuccaugaaggcu

SEQ ID NO: 151741 - RNA, 25 nt, Artificial Sequence
  Description of Artificial Sequence: Synthetic oligonucleotide
aacaguaaagucacgcuggaguggu

SEQ ID NO: 151742 - RNA, 25 nt, Artificial Sequence
  Description of Artificial Sequence: Synthetic oligonucleotide
ugugaagaaaguaaaggaagagagg

SEQ ID NO: 151743 - RNA, 25 nt, Artificial Sequence
  Description of Artificial Sequence: Synthetic oligonucleotide
cuuccgagccauccuugcaucgggc

SEQ ID NO: 151744 - RNA, 25 nt, Artificial Sequence
  Description of Artificial Sequence: Synthetic oligonucleotide
aauggagguugaauauccuacugug

SEQ ID NO: 151745 - RNA, 25 nt, Artificial Sequence
  Description of Artificial Sequence: Synthetic oligonucleotide
ggagguugaauauccuacuguguaa

SEQ ID NO: 151746 - RNA, 25 nt, Artificial Sequence
  Description of Artificial Sequence: Synthetic oligonucleotide
auuuugaguuuucccuuguagugua

SEQ ID NO: 151747 - RNA, 25 nt, Artificial Sequence
  Description of Artificial Sequence: Synthetic oligonucleotide
uauccuguuuguucuuuguugauug

SEQ ID NO: 151748 - RNA, 25 nt, Artificial Sequence
  Description of Artificial Sequence: Synthetic oligonucleotide
ccuguuuguucuuuguugauugaaa

SEQ ID NO: 151749 - RNA, 25 nt, Artificial Sequence
  Description of Artificial Sequence: Synthetic oligonucleotide
cucuacagccuucuuuuucuuccau

SEQ ID NO: 151750 - RNA, 25 nt, Artificial Sequence
  Description of Artificial Sequence: Synthetic oligonucleotide
ucuuccauagcuaaucuuccuucua

SEQ ID NO: 151751 - RNA, 25 nt, Artificial Sequence
  Description of Artificial Sequence: Synthetic oligonucleotide
auaaucuuccuguugaaugcuucau

SEQ ID NO: 151752 - RNA, 25 nt, Artificial Sequence
  Description of Artificial Sequence: Synthetic oligonucleotide
uaaucuuccuguugaaugcuucaug

SEQ ID NO: 151753 - RNA, 25 nt, Artificial Sequence
  Description of Artificial Sequence: Synthetic oligonucleotide
cuucaugacuugaauucuacuuuga

SEQ ID NO: 151754 - RNA, 25 nt, Artificial Sequence
  Description of Artificial Sequence: Synthetic oligonucleotide
aagagggagagaagcaacuacagac

SEQ ID NO: 151755 - RNA, 25 nt, Artificial Sequence
  Description of Artificial Sequence: Synthetic oligonucleotide
cgucuccuaccagaccaaggucaac

SEQ ID NO: 151756 - RNA, 25 nt, Artificial Sequence
  Description of Artificial Sequence: Synthetic oligonucleotide
gaucaaucggcccgacuaucucgac

SEQ ID NO: 151757 - RNA, 25 nt, Artificial Sequence
  Description of Artificial Sequence: Synthetic oligonucleotide
ggacgaacauccaaccuucccaaac

SEQ ID NO: 151758 - RNA, 25 nt, Artificial Sequence
  Description of Artificial Sequence: Synthetic oligonucleotide
agggucggaacccaagcuuagaacu

SEQ ID NO: 151759 - RNA, 25 nt, Artificial Sequence
  Description of Artificial Sequence: Synthetic oligonucleotide
ucggaacccaagcuuagaacuuuaa

SEQ ID NO: 151760 - RNA, 25 nt, Artificial Sequence
  Description of Artificial Sequence: Synthetic oligonucleotide
acccaagcuuagaacuuuaagcaac

SEQ ID NO: 151761 - RNA, 25 nt, Artificial Sequence
  Description of Artificial Sequence: Synthetic oligonucleotide
gaacuuuaagcaacaagaccaccac

SEQ ID NO: 151762 - RNA, 25 nt, Artificial Sequence
  Description of Artificial Sequence: Synthetic oligonucleotide
acuauucaguggcgagaaauaaagu

SEQ ID NO: 151763 - RNA, 25 nt, Artificial Sequence
  Description of Artificial Sequence: Synthetic oligonucleotide
cuauucaguggcgagaaauaaaguu

SEQ ID NO: 151764 - RNA, 25 nt, Artificial Sequence
  Description of Artificial Sequence: Synthetic oligonucleotide
aaacacagauaacaggaaaugaucc

SEQ ID NO: 151765 - RNA, 25 nt, Artificial Sequence
  Description of Artificial Sequence: Synthetic oligonucleotide
cuuaagaaaagagaagaaaugaaac

SEQ ID NO: 151766 - RNA, 25 nt, Artificial Sequence
  Description of Artificial Sequence: Synthetic oligonucleotide
cugaaggaguguguuuccauccucc

SEQ ID NO: 151767 - RNA, 25 nt, Artificial Sequence
  Description of Artificial Sequence: Synthetic oligonucleotide
ucaccgcgggacugaaaaucuuuga

SEQ ID NO: 151768 - RNA, 25 nt, Artificial Sequence
  Description of Artificial Sequence: Synthetic oligonucleotide
agcagaaauaagcgugccguucagg

SEQ ID NO: 151769 - RNA, 25 nt, Artificial Sequence
  Description of Artificial Sequence: Synthetic oligonucleotide
aagcgugccguucaggguccagaag

SEQ ID NO: 151770 - RNA, 25 nt, Artificial Sequence
  Description of Artificial Sequence: Synthetic oligonucleotide
agaaacagucacucaagacugcuug

SEQ ID NO: 151771 - RNA, 25 nt, Artificial Sequence
  Description of Artificial Sequence: Synthetic oligonucleotide
agaggaagaagguccaugucuuugg

SEQ ID NO: 151772 - RNA, 25 nt, Artificial Sequence
  Description of Artificial Sequence: Synthetic oligonucleotide
uguauucaaaauaugccugaaacac

SEQ ID NO: 151773 - RNA, 25 nt, Artificial Sequence
  Description of Artificial Sequence: Synthetic oligonucleotide
auuuuccucccuuucucuguaccuc

SEQ ID NO: 151774 - RNA, 25 nt, Artificial Sequence
  Description of Artificial Sequence: Synthetic oligonucleotide
caaagaaagauagagcaagacaaga

SEQ ID NO: 151775 - RNA, 25 nt, Artificial Sequence
  Description of Artificial Sequence: Synthetic oligonucleotide
aagaaagauagagcaagacaagaaa

SEQ ID NO: 151776 - RNA, 25 nt, Artificial Sequence
  Description of Artificial Sequence: Synthetic oligonucleotide
gaaagcauuuguuuguacaagaucc

SEQ ID NO: 151777 - RNA, 25 nt, Artificial Sequence
  Description of Artificial Sequence: Synthetic oligonucleotide
ugaguuaaacgaacguacuugcaga

SEQ ID NO: 151778 - RNA, 25 nt, Artificial Sequence
  Description of Artificial Sequence: Synthetic oligonucleotide
acugauacagaacgaucgauacaga

SEQ ID NO: 151779 - RNA, 25 nt, Artificial Sequence
  Description of Artificial Sequence: Synthetic oligonucleotide
auauuauauauauauaaaaauaaau

SEQ ID NO: 151780 - RNA, 25 nt, Artificial Sequence
  Description of Artificial Sequence: Synthetic oligonucleotide
auuauauauauauaaaaauaaauau

SEQ ID NO: 151781 - RNA, 25 nt, Artificial Sequence
  Description of Artificial Sequence: Synthetic oligonucleotide
ucacuggauguauuugacugcugug

SEQ ID NO: 151782 - RNA, 25 nt, Artificial Sequence
  Description of Artificial Sequence: Synthetic oligonucleotide
cagggaagaggaggagaugagagac

SEQ ID NO: 151783 - RNA, 25 nt, Artificial Sequence
  Description of Artificial Sequence: Synthetic oligonucleotide
augaucuuuuuuuugucccacuugg

SEQ ID NO: 151784 - RNA, 27 nt, Artificial Sequence
  Description of Artificial Sequence: Synthetic oligonucleotide
ggccgugaacuccucaucaaaauaccu

SEQ ID NO: 151785 - RNA, 27 nt, Artificial Sequence
  Description of Artificial Sequence: Synthetic oligonucleotide
uggugugauggugaucaucugggccgu

SEQ ID NO: 151786 - RNA, 27 nt, Artificial Sequence
  Description of Artificial Sequence: Synthetic oligonucleotide
aaacccgcaggauaguuuucuucccua

SEQ ID NO: 151787 - RNA, 27 nt, Artificial Sequence
  Description of Artificial Sequence: Synthetic oligonucleotide
caaacuggaugaaauaaauuaaaaccc

SEQ ID NO: 151788 - RNA, 27 nt, Artificial Sequence
  Description of Artificial Sequence: Synthetic oligonucleotide
agaaguccuuaacauuucccuacguga

SEQ ID NO: 151789 - RNA, 27 nt, Artificial Sequence
  Description of Artificial Sequence: Synthetic oligonucleotide
cucugucccacuggguaaacccuggcc

SEQ ID NO: 151790 - RNA, 27 nt, Artificial Sequence
  Description of Artificial Sequence: Synthetic oligonucleotide
cacaauaacaaauuuaaaccuugcucc

SEQ ID NO: 151791 - RNA, 27 nt, Artificial Sequence
  Description of Artificial Sequence: Synthetic oligonucleotide
aaaugcauuugaacaacauaauacaca

SEQ ID NO: 151792 - RNA, 27 nt, Artificial Sequence
  Description of Artificial Sequence: Synthetic oligonucleotide
ggcuuuccugucacaaagauuaaaaac

SEQ ID NO: 151793 - RNA, 27 nt, Artificial Sequence
  Description of Artificial Sequence: Synthetic oligonucleotide
agggcuuuccugucacaaagauuaaaa

SEQ ID NO: 151794 - RNA, 27 nt, Artificial Sequence
  Description of Artificial Sequence: Synthetic oligonucleotide
ggccaugcugggagacauaagcagcag

SEQ ID NO: 151795 - RNA, 27 nt, Artificial Sequence
  Description of Artificial Sequence: Synthetic oligonucleotide
ucagggagaagcuucugaaacacuucu

SEQ ID NO: 151796 - RNA, 27 nt, Artificial Sequence
  Description of Artificial Sequence: Synthetic oligonucleotide
aagggcuucuuccuuauugauggucag

SEQ ID NO: 151797 - RNA, 27 nt, Artificial Sequence
  Description of Artificial Sequence: Synthetic oligonucleotide
ugaagggcuucuuccuuauugaugguc

SEQ ID NO: 151798 - RNA, 27 nt, Artificial Sequence
  Description of Artificial Sequence: Synthetic oligonucleotide
cgcugaagggcuucuuccuuauugaug

SEQ ID NO: 151799 - RNA, 27 nt, Artificial Sequence
  Description of Artificial Sequence: Synthetic oligonucleotide
gccgcugaagggcuucuuccuuauuga

SEQ ID NO: 151800 - RNA, 27 nt, Artificial Sequence
  Description of Artificial Sequence: Synthetic oligonucleotide
acuggccgcugaagggcuucuuccuua

SEQ ID NO: 151801 - RNA, 27 nt, Artificial Sequence
  Description of Artificial Sequence: Synthetic oligonucleotide
cggagcuuuucaccuuuaguuaugcuu

SEQ ID NO: 151802 - RNA, 27 nt, Artificial Sequence
  Description of Artificial Sequence: Synthetic oligonucleotide
ccggagcuuuucaccuuuaguuaugcu

SEQ ID NO: 151803 - RNA, 27 nt, Artificial Sequence
  Description of Artificial Sequence: Synthetic oligonucleotide
cagacuguugacuggcgugauguaguu

SEQ ID NO: 151804 - RNA, 27 nt, Artificial Sequence
  Description of Artificial Sequence: Synthetic oligonucleotide
cuuuugaacucugcuuaaauccagugg

SEQ ID NO: 151805 - RNA, 27 nt, Artificial Sequence
  Description of Artificial Sequence: Synthetic oligonucleotide
gcuuuugaacucugcuuaaauccagug

SEQ ID NO: 151806 - RNA, 27 nt, Artificial Sequence
  Description of Artificial Sequence: Synthetic oligonucleotide
agggcuuuugaacucugcuuaaaucca

SEQ ID NO: 151807 - RNA, 27 nt, Artificial Sequence
  Description of Artificial Sequence: Synthetic oligonucleotide
aagggcuuuugaacucugcuuaaaucc

SEQ ID NO: 151808 - RNA, 27 nt, Artificial Sequence
  Description of Artificial Sequence: Synthetic oligonucleotide
ugaagggcuuuugaacucugcuuaaau

SEQ ID NO: 151809 - RNA, 27 nt, Artificial Sequence
  Description of Artificial Sequence: Synthetic oligonucleotide
cugaagggcuuuugaacucugcuuaaa

SEQ ID NO: 151810 - RNA, 27 nt, Artificial Sequence
  Description of Artificial Sequence: Synthetic oligonucleotide
cgcugaagggcuuuugaacucugcuua

SEQ ID NO: 151811 - RNA, 27 nt, Artificial Sequence
  Description of Artificial Sequence: Synthetic oligonucleotide
cgagcggcuucacucagacccugaggc

SEQ ID NO: 151812 - RNA, 27 nt, Artificial Sequence
  Description of Artificial Sequence: Synthetic oligonucleotide
uugacuggcgugauguaguugcuuggg

SEQ ID NO: 151813 - RNA, 27 nt, Artificial Sequence
  Description of Artificial Sequence: Synthetic oligonucleotide
cacgcaccaagaagcugccauugaucc

SEQ ID NO: 151814 - RNA, 27 nt, Artificial Sequence
  Description of Artificial Sequence: Synthetic oligonucleotide
cugaugaauccaaugugggcuggaauc

SEQ ID NO: 151815 - RNA, 27 nt, Artificial Sequence
  Description of Artificial Sequence: Synthetic oligonucleotide
cuuagguauuccacauucucagcugug

SEQ ID NO: 151816 - RNA, 27 nt, Artificial Sequence
  Description of Artificial Sequence: Synthetic oligonucleotide
ugagccucaaauuaggagauacguuuu

SEQ ID NO: 151817 - RNA, 27 nt, Artificial Sequence
  Description of Artificial Sequence: Synthetic oligonucleotide
ccaauuguagagaaauuauuuuaggaa

SEQ ID NO: 151818 - RNA, 27 nt, Artificial Sequence
  Description of Artificial Sequence: Synthetic oligonucleotide
ggcuccuaacuagcugaaucuuccaau

SEQ ID NO: 151819 - RNA, 27 nt, Artificial Sequence
  Description of Artificial Sequence: Synthetic oligonucleotide
guggauauugacuaggagaguuuaaaa

SEQ ID NO: 151820 - RNA, 27 nt, Artificial Sequence
  Description of Artificial Sequence: Synthetic oligonucleotide
ugugacugaacauaacuguaggcugaa

SEQ ID NO: 151821 - RNA, 27 nt, Artificial Sequence
  Description of Artificial Sequence: Synthetic oligonucleotide
guaugugugugugacugaacauaacug

SEQ ID NO: 151822 - RNA, 27 nt, Artificial Sequence
  Description of Artificial Sequence: Synthetic oligonucleotide
aagcaaaaggaacauuuuguaugugug

SEQ ID NO: 151823 - RNA, 27 nt, Artificial Sequence
  Description of Artificial Sequence: Synthetic oligonucleotide
aaaaauuacuuuaaaagcaaaaggaac

SEQ ID NO: 151824 - RNA, 27 nt, Artificial Sequence
  Description of Artificial Sequence: Synthetic oligonucleotide
ccauugacuguugcuucacaggucaga

SEQ ID NO: 151825 - RNA, 27 nt, Artificial Sequence
  Description of Artificial Sequence: Synthetic oligonucleotide
auugguuugucgaugugugagauaguu

SEQ ID NO: 151826 - RNA, 27 nt, Artificial Sequence
  Description of Artificial Sequence: Synthetic oligonucleotide
agugguagcaguacaauugaggacaag

SEQ ID NO: 151827 - RNA, 27 nt, Artificial Sequence
  Description of Artificial Sequence: Synthetic oligonucleotide
uaagaccgcuugccagcuacgguuuca

SEQ ID NO: 151828 - RNA, 27 nt, Artificial Sequence
  Description of Artificial Sequence: Synthetic oligonucleotide
agccgguaagaccgcuugccagcuacg

SEQ ID NO: 151829 - RNA, 27 nt, Artificial Sequence
  Description of Artificial Sequence: Synthetic oligonucleotide
gguaacccaucuuuuaaccauacaacu

SEQ ID NO: 151830 - RNA, 27 nt, Artificial Sequence
  Description of Artificial Sequence: Synthetic oligonucleotide
ucgcagguaacccaucuuuuaaccaua

SEQ ID NO: 151831 - RNA, 27 nt, Artificial Sequence
  Description of Artificial Sequence: Synthetic oligonucleotide
cucagcaagauuguauaauucccugca

SEQ ID NO: 151832 - RNA, 27 nt, Artificial Sequence
  Description of Artificial Sequence: Synthetic oligonucleotide
acuguuuuaugcucagcaagauuguau

SEQ ID NO: 151833 - RNA, 27 nt, Artificial Sequence
  Description of Artificial Sequence: Synthetic oligonucleotide
aggauaaaggacucuucauuauuggaa

SEQ ID NO: 151834 - RNA, 27 nt, Artificial Sequence
  Description of Artificial Sequence: Synthetic oligonucleotide
caacuugcguuggaacauccaaagugu

SEQ ID NO: 151835 - RNA, 27 nt, Artificial Sequence
  Description of Artificial Sequence: Synthetic oligonucleotide
augguuucaguuuaguggaagcauuua

SEQ ID NO: 151836 - RNA, 27 nt, Artificial Sequence
  Description of Artificial Sequence: Synthetic oligonucleotide
auauuuaacaaagucaaacuuucucac

SEQ ID NO: 151837 - RNA, 27 nt, Artificial Sequence
  Description of Artificial Sequence: Synthetic oligonucleotide
aacuuuuaauauacaguaguucuuuuc

SEQ ID NO: 151838 - RNA, 27 nt, Artificial Sequence
  Description of Artificial Sequence: Synthetic oligonucleotide
guuaagucaaaacccguauuucuaaag

SEQ ID NO: 151839 - RNA, 27 nt, Artificial Sequence
  Description of Artificial Sequence: Synthetic oligonucleotide
gugcugaguuugcuguacccauguuga

SEQ ID NO: 151840 - RNA, 27 nt, Artificial Sequence
  Description of Artificial Sequence: Synthetic oligonucleotide
ugaggucagcaucuucugugucuuuac

SEQ ID NO: 151841 - RNA, 27 nt, Artificial Sequence
  Description of Artificial Sequence: Synthetic oligonucleotide
gcgaucugaauaaaccucccuacuagc

SEQ ID NO: 151842 - RNA, 27 nt, Artificial Sequence
  Description of Artificial Sequence: Synthetic oligonucleotide
aucccagaacccugcugcagaaggcca

SEQ ID NO: 151843 - RNA, 27 nt, Artificial Sequence
  Description of Artificial Sequence: Synthetic oligonucleotide
cauaauuuccaauauguaccagaccuu

SEQ ID NO: 151844 - RNA, 27 nt, Artificial Sequence
  Description of Artificial Sequence: Synthetic oligonucleotide
cuagugcuuccaucggaaggacuaggu

SEQ ID NO: 151845 - RNA, 27 nt, Artificial Sequence
  Description of Artificial Sequence: Synthetic oligonucleotide
uccacauaaaaacaauauucacuggga

SEQ ID NO: 151846 - RNA, 27 nt, Artificial Sequence
  Description of Artificial Sequence: Synthetic oligonucleotide
ucuaccaauuccaacuugaauucauug

SEQ ID NO: 151847 - RNA, 27 nt, Artificial Sequence
  Description of Artificial Sequence: Synthetic oligonucleotide
ucuccaagucuaaaucuguguccugag

SEQ ID NO: 151848 - RNA, 27 nt, Artificial Sequence
  Description of Artificial Sequence: Synthetic oligonucleotide
uggaauacuguaacugugcuuugagga

SEQ ID NO: 151849 - RNA, 27 nt, Artificial Sequence
  Description of Artificial Sequence: Synthetic oligonucleotide
uuaauucaucagugguggcagugguag

SEQ ID NO: 151850 - RNA, 27 nt, Artificial Sequence
  Description of Artificial Sequence: Synthetic oligonucleotide
gugaugauguggcacuaguaguuucuu

SEQ ID NO: 151851 - RNA, 27 nt, Artificial Sequence
  Description of Artificial Sequence: Synthetic oligonucleotide
ucuguuuggugaggcuguccgacuuug

SEQ ID NO: 151852 - RNA, 27 nt, Artificial Sequence
  Description of Artificial Sequence: Synthetic oligonucleotide
ccaucauguuccauuuuucgcuuucuc

SEQ ID NO: 151853 - RNA, 27 nt, Artificial Sequence
  Description of Artificial Sequence: Synthetic oligonucleotide
gcagucuacaugcuaaaucagagggua

SEQ ID NO: 151854 - RNA, 27 nt, Artificial Sequence
  Description of Artificial Sequence: Synthetic oligonucleotide
cauaaauagauccuuaaauagcucaaa

SEQ ID NO: 151855 - RNA, 27 nt, Artificial Sequence
  Description of Artificial Sequence: Synthetic oligonucleotide
ugauaauagugcuuuuucaccuuuuuc

SEQ ID NO: 151856 - RNA, 27 nt, Artificial Sequence
  Description of Artificial Sequence: Synthetic oligonucleotide
gcagaacugauaauagugcuuuuucac

SEQ ID NO: 151857 - RNA, 27 nt, Artificial Sequence
  Description of Artificial Sequence: Synthetic oligonucleotide
guagguuuaaucuuucuuuucagccau

SEQ ID NO: 151858 - RNA, 27 nt, Artificial Sequence
  Description of Artificial Sequence: Synthetic oligonucleotide
agaaggauuuuauuauaaggguuuaau

SEQ ID NO: 151859 - RNA, 27 nt, Artificial Sequence
  Description of Artificial Sequence: Synthetic oligonucleotide
gucuacagcauuggcuaauaguaugaa

SEQ ID NO: 151860 - RNA, 27 nt, Artificial Sequence
  Description of Artificial Sequence: Synthetic oligonucleotide
cuauuccuaucaaaaugcuucugucua

SEQ ID NO: 151861 - RNA, 27 nt, Artificial Sequence
  Description of Artificial Sequence: Synthetic oligonucleotide
ucagggccauuaucuuauuugcucuau

SEQ ID NO: 151862 - RNA, 27 nt, Artificial Sequence
  Description of Artificial Sequence: Synthetic oligonucleotide
ugcuugaggaagagaaaaauguugguc

SEQ ID NO: 151863 - RNA, 27 nt, Artificial Sequence
  Description of Artificial Sequence: Synthetic oligonucleotide
ugggcugaacuuuucucauacuuaaag

SEQ ID NO: 151864 - RNA, 27 nt, Artificial Sequence
  Description of Artificial Sequence: Synthetic oligonucleotide
gguucagcagccaucuuuauuccugcg

SEQ ID NO: 151865 - RNA, 27 nt, Artificial Sequence
  Description of Artificial Sequence: Synthetic oligonucleotide
ugaagagaacuuggucauucaaauuuc

SEQ ID NO: 151866 - RNA, 27 nt, Artificial Sequence
  Description of Artificial Sequence: Synthetic oligonucleotide
cucuaggcuggcuaucuuuauacauac

SEQ ID NO: 151867 - RNA, 27 nt, Artificial Sequence
  Description of Artificial Sequence: Synthetic oligonucleotide
acacuucacagagauaguuacagccau

SEQ ID NO: 151868 - RNA, 27 nt, Artificial Sequence
  Description of Artificial Sequence: Synthetic oligonucleotide
uugaaauuuucucacacuucacagaga

SEQ ID NO: 151869 - RNA, 27 nt, Artificial Sequence
  Description of Artificial Sequence: Synthetic oligonucleotide
ucaggaggauucauuuccuuaaaggaa

SEQ ID NO: 151870 - RNA, 27 nt, Artificial Sequence
  Description of Artificial Sequence: Synthetic oligonucleotide
auaugaugucacuuuuuguauccuuga

SEQ ID NO: 151871 - RNA, 27 nt, Artificial Sequence
  Description of Artificial Sequence: Synthetic oligonucleotide
uaugaugaagauucaaauugcaucuua

SEQ ID NO: 151872 - RNA, 27 nt, Artificial Sequence
  Description of Artificial Sequence: Synthetic oligonucleotide
uuaauagcuagucuucguuuugaacag

SEQ ID NO: 151873 - RNA, 27 nt, Artificial Sequence
  Description of Artificial Sequence: Synthetic oligonucleotide
auuuuuaguagagaugagguuucacca

SEQ ID NO: 151874 - RNA, 27 nt, Artificial Sequence
  Description of Artificial Sequence: Synthetic oligonucleotide
aggcgagauagagcuucucuuucguuc

SEQ ID NO: 151875 - RNA, 27 nt, Artificial Sequence
  Description of Artificial Sequence: Synthetic oligonucleotide
aacuggaccgaaggcgcuuguggagaa

SEQ ID NO: 151876 - RNA, 27 nt, Artificial Sequence
  Description of Artificial Sequence: Synthetic oligonucleotide
gcggcuacaucuuuggaaucuucuccu

SEQ ID NO: 151877 - RNA, 27 nt, Artificial Sequence
  Description of Artificial Sequence: Synthetic oligonucleotide
caagucuccucauugaauccagauugg

SEQ ID NO: 151878 - RNA, 27 nt, Artificial Sequence
  Description of Artificial Sequence: Synthetic oligonucleotide
uccucacuacucucaaaucuguucugg

SEQ ID NO: 151879 - RNA, 27 nt, Artificial Sequence
  Description of Artificial Sequence: Synthetic oligonucleotide
uuuguacucaucugcacagcucuggcu

SEQ ID NO: 151880 - RNA, 27 nt, Artificial Sequence
  Description of Artificial Sequence: Synthetic oligonucleotide
gcccauuaacaacaacaaucugaggug

SEQ ID NO: 151881 - RNA, 27 nt, Artificial Sequence
  Description of Artificial Sequence: Synthetic oligonucleotide
aauaaauuaaaaauaauuaaaauagug

SEQ ID NO: 151882 - RNA, 27 nt, Artificial Sequence
  Description of Artificial Sequence: Synthetic oligonucleotide
cauauuuaaauauuaauaaauuaaaaa

SEQ ID NO: 151883 - RNA, 27 nt, Artificial Sequence
  Description of Artificial Sequence: Synthetic oligonucleotide
gaaacaaaggauauucaaacugcauag

SEQ ID NO: 151884 - RNA, 27 nt, Artificial Sequence
  Description of Artificial Sequence: Synthetic oligonucleotide
caaacacuuagacgccagcagcauggg

SEQ ID NO: 151885 - RNA, 27 nt, Artificial Sequence
  Description of Artificial Sequence: Synthetic oligonucleotide
uuugucacaggugaaaugcacaucuga

SEQ ID NO: 151886 - RNA, 27 nt, Artificial Sequence
  Description of Artificial Sequence: Synthetic oligonucleotide
uaauucagccuggcacagguuuugauc

SEQ ID NO: 151887 - RNA, 27 nt, Artificial Sequence
  Description of Artificial Sequence: Synthetic oligonucleotide
auuguaagaaugacuacccacauucac

SEQ ID NO: 151888 - RNA, 27 nt, Artificial Sequence
  Description of Artificial Sequence: Synthetic oligonucleotide
caauuguaagaaugacuacccacauuc

SEQ ID NO: 151889 - RNA, 27 nt, Artificial Sequence
  Description of Artificial Sequence: Synthetic oligonucleotide
guacacucucugaugcucauuuucaua

SEQ ID NO: 151890 - RNA, 27 nt, Artificial Sequence
  Description of Artificial Sequence: Synthetic oligonucleotide
cugcugaguucuacaugaaaagcaaau

SEQ ID NO: 151891 - RNA, 27 nt, Artificial Sequence
  Description of Artificial Sequence: Synthetic oligonucleotide
uacugaaaauaaauauagaaauacaac

SEQ ID NO: 151892 - RNA, 27 nt, Artificial Sequence
  Description of Artificial Sequence: Synthetic oligonucleotide
uuccauuuaagaaacauuaaucaaaac

SEQ ID NO: 151893 - RNA, 27 nt, Artificial Sequence
  Description of Artificial Sequence: Synthetic oligonucleotide
acaauuuuaggcacuauacacguuguu

SEQ ID NO: 151894 - RNA, 27 nt, Artificial Sequence
  Description of Artificial Sequence: Synthetic oligonucleotide
ccagauguuaguagccaaggauauggu

SEQ ID NO: 151895 - RNA, 27 nt, Artificial Sequence
  Description of Artificial Sequence: Synthetic oligonucleotide
agcucacagucuccagauguuaguagc

SEQ ID NO: 151896 - RNA, 27 nt, Artificial Sequence
  Description of Artificial Sequence: Synthetic oligonucleotide
auuaauaaaaagcacacaacuuauggc

SEQ ID NO: 151897 - RNA, 27 nt, Artificial Sequence
  Description of Artificial Sequence: Synthetic oligonucleotide
aauguaagaagagccaaaaugaugcau

SEQ ID NO: 151898 - RNA, 27 nt, Artificial Sequence
  Description of Artificial Sequence: Synthetic oligonucleotide
acauuuuuacaaauguaagaagagcca

SEQ ID NO: 151899 - RNA, 27 nt, Artificial Sequence
  Description of Artificial Sequence: Synthetic oligonucleotide
aauaugaauuaagaugaccuaaucugu

SEQ ID NO: 151900 - RNA, 27 nt, Artificial Sequence
  Description of Artificial Sequence: Synthetic oligonucleotide
ucaugauuaguucuuucaauuccaucc

SEQ ID NO: 151901 - RNA, 27 nt, Artificial Sequence
  Description of Artificial Sequence: Synthetic oligonucleotide
cccaagagcagaaggaaugagugugca

SEQ ID NO: 151902 - RNA, 27 nt, Artificial Sequence
  Description of Artificial Sequence: Synthetic oligonucleotide
cucaaagcuacugguuaccucuacacc

SEQ ID NO: 151903 - RNA, 27 nt, Artificial Sequence
  Description of Artificial Sequence: Synthetic oligonucleotide
ugaaauauuacguggcaugugguuggg

SEQ ID NO: 151904 - RNA, 27 nt, Artificial Sequence
  Description of Artificial Sequence: Synthetic oligonucleotide
agugaagagaauaacuuguuuccgaag

SEQ ID NO: 151905 - RNA, 27 nt, Artificial Sequence
  Description of Artificial Sequence: Synthetic oligonucleotide
uuucuuagcauuaguuauugggaguga

SEQ ID NO: 151906 - RNA, 27 nt, Artificial Sequence
  Description of Artificial Sequence: Synthetic oligonucleotide
uugauuuucagcauuucuuagcauuag

SEQ ID NO: 151907 - RNA, 27 nt, Artificial Sequence
  Description of Artificial Sequence: Synthetic oligonucleotide
aaaguaaucauauuuagagaaagacag

SEQ ID NO: 151908 - RNA, 27 nt, Artificial Sequence
  Description of Artificial Sequence: Synthetic oligonucleotide
uguagaacaaaaugccugaaauucagc

SEQ ID NO: 151909 - RNA, 27 nt, Artificial Sequence
  Description of Artificial Sequence: Synthetic oligonucleotide
gagagucccgggugagagggaaucgcc

SEQ ID NO: 151910 - RNA, 27 nt, Artificial Sequence
  Description of Artificial Sequence: Synthetic oligonucleotide
cuuuacuuuaaagguucacuuuccuug

SEQ ID NO: 151911 - RNA, 27 nt, Artificial Sequence
  Description of Artificial Sequence: Synthetic oligonucleotide
ccaggcuuccagagcaugcagccuccu

SEQ ID NO: 151912 - RNA, 27 nt, Artificial Sequence
  Description of Artificial Sequence: Synthetic oligonucleotide
cucucuuuuguuuucuguucagagaaa

SEQ ID NO: 151913 - RNA, 27 nt, Artificial Sequence
  Description of Artificial Sequence: Synthetic oligonucleotide
cggcauaacugauuacagccaaguuca

SEQ ID NO: 151914 - RNA, 27 nt, Artificial Sequence
  Description of Artificial Sequence: Synthetic oligonucleotide
uggacuucuuuuaauuuuggcuucuuc

SEQ ID NO: 151915 - RNA, 27 nt, Artificial Sequence
  Description of Artificial Sequence: Synthetic oligonucleotide
uaaccucaccuggacuucuuuuaauuu

SEQ ID NO: 151916 - RNA, 27 nt, Artificial Sequence
  Description of Artificial Sequence: Synthetic oligonucleotide
guccucuucccgauaauccggauucag

SEQ ID NO: 151917 - RNA, 27 nt, Artificial Sequence
  Description of Artificial Sequence: Synthetic oligonucleotide
acaauacuugcuuugaugucacauuaa

SEQ ID NO: 151918 - RNA, 27 nt, Artificial Sequence
  Description of Artificial Sequence: Synthetic oligonucleotide
gagugcuacaauacuugcuuugauguc

SEQ ID NO: 151919 - RNA, 27 nt, Artificial Sequence
  Description of Artificial Sequence: Synthetic oligonucleotide
auuugugguuuuguuuucucucucucu

SEQ ID NO: 151920 - RNA, 27 nt, Artificial Sequence
  Description of Artificial Sequence: Synthetic oligonucleotide
uguaugggcuuaaauacuacagcgagg

SEQ ID NO: 151921 - RNA, 27 nt, Artificial Sequence
  Description of Artificial Sequence: Synthetic oligonucleotide
cuguaugggcuuaaauacuacagcgag

SEQ ID NO: 151922 - RNA, 27 nt, Artificial Sequence
  Description of Artificial Sequence: Synthetic oligonucleotide
ggaagguuucuguaugggcuuaaauac

SEQ ID NO: 151923 - RNA, 27 nt, Artificial Sequence
  Description of Artificial Sequence: Synthetic oligonucleotide
guagguauaccauguuuauuuuaauac

SEQ ID NO: 151924 - RNA, 27 nt, Artificial Sequence
  Description of Artificial Sequence: Synthetic oligonucleotide
uccgaaaacuggccgaucagaacagcc

SEQ ID NO: 151925 - RNA, 27 nt, Artificial Sequence
  Description of Artificial Sequence: Synthetic oligonucleotide
cccuguuccaaaguucaaauuauuugu

SEQ ID NO: 151926 - RNA, 27 nt, Artificial Sequence
  Description of Artificial Sequence: Synthetic oligonucleotide
acuggaaaguuaaauuaaggucgcaau

SEQ ID NO: 151927 - RNA, 27 nt, Artificial Sequence
  Description of Artificial Sequence: Synthetic oligonucleotide
caaaaccaaacuuuagcuuucucagcc

SEQ ID NO: 151928 - RNA, 27 nt, Artificial Sequence
  Description of Artificial Sequence: Synthetic oligonucleotide
uacagugggaaguagcaucuuuacuuu

SEQ ID NO: 151929 - RNA, 27 nt, Artificial Sequence
  Description of Artificial Sequence: Synthetic oligonucleotide
ucauaugguaucagcaauuaagcagua

SEQ ID NO: 151930 - RNA, 27 nt, Artificial Sequence
  Description of Artificial Sequence: Synthetic oligonucleotide
cagcccauguuucauucauaugguauc

SEQ ID NO: 151931 - RNA, 27 nt, Artificial Sequence
  Description of Artificial Sequence: Synthetic oligonucleotide
uaugaaaaaguuggauaagaaaguugg

SEQ ID NO: 151932 - RNA, 27 nt, Artificial Sequence
  Description of Artificial Sequence: Synthetic oligonucleotide
uccggccucaugaugucaugcaaggcu

SEQ ID NO: 151933 - RNA, 27 nt, Artificial Sequence
  Description of Artificial Sequence: Synthetic oligonucleotide
acaaaugcagucauauacaaauucagg

SEQ ID NO: 151934 - RNA, 27 nt, Artificial Sequence
  Description of Artificial Sequence: Synthetic oligonucleotide
gguaguaaacauucuacuaggauucuu

SEQ ID NO: 151935 - RNA, 27 nt, Artificial Sequence
  Description of Artificial Sequence: Synthetic oligonucleotide
uuucaucaaaaaauucuucccuuucug

SEQ ID NO: 151936 - RNA, 27 nt, Artificial Sequence
  Description of Artificial Sequence: Synthetic oligonucleotide
aaauucacacacuggcaugccgauagc

SEQ ID NO: 151937 - RNA, 27 nt, Artificial Sequence
  Description of Artificial Sequence: Synthetic oligonucleotide
acauacauugcucuacuaugaggugaa

SEQ ID NO: 151938 - RNA, 27 nt, Artificial Sequence
  Description of Artificial Sequence: Synthetic oligonucleotide
uauauaugugcuuuggcaauucuggug

SEQ ID NO: 151939 - RNA, 27 nt, Artificial Sequence
  Description of Artificial Sequence: Synthetic oligonucleotide
ggagaaacuauuacccagaucaccacu

SEQ ID NO: 151940 - RNA, 27 nt, Artificial Sequence
  Description of Artificial Sequence: Synthetic oligonucleotide
auuuggagaaacuauuacccagaucac

SEQ ID NO: 151941 - RNA, 27 nt, Artificial Sequence
  Description of Artificial Sequence: Synthetic oligonucleotide
uuucuaggaaguauucaucacauccac

SEQ ID NO: 151942 - RNA, 27 nt, Artificial Sequence
  Description of Artificial Sequence: Synthetic oligonucleotide
cauauaugguguagcuguggaaaugcg

SEQ ID NO: 151943 - RNA, 27 nt, Artificial Sequence
  Description of Artificial Sequence: Synthetic oligonucleotide
cuccauucauauaugguguagcugugg

SEQ ID NO: 151944 - RNA, 27 nt, Artificial Sequence
  Description of Artificial Sequence: Synthetic oligonucleotide
aucuucuucucguguaagaacugcagc

SEQ ID NO: 151945 - RNA, 27 nt, Artificial Sequence
  Description of Artificial Sequence: Synthetic oligonucleotide
ucccuguaaaugaucuucuucucgugu

SEQ ID NO: 151946 - RNA, 27 nt, Artificial Sequence
  Description of Artificial Sequence: Synthetic oligonucleotide
gucccuguaaaugaucuucuucucgug

SEQ ID NO: 151947 - RNA, 27 nt, Artificial Sequence
  Description of Artificial Sequence: Synthetic oligonucleotide
ucaggucccuguaaaugaucuucuucu

SEQ ID NO: 151948 - RNA, 27 nt, Artificial Sequence
  Description of Artificial Sequence: Synthetic oligonucleotide
gaugcagucaaacaccucuuccucugu

SEQ ID NO: 151949 - RNA, 27 nt, Artificial Sequence
  Description of Artificial Sequence: Synthetic oligonucleotide
cgaugcagucaaacaccucuuccucug

SEQ ID NO: 151950 - RNA, 27 nt, Artificial Sequence
  Description of Artificial Sequence: Synthetic oligonucleotide
cccugugaacucgcccucaaaguagcg

SEQ ID NO: 151951 - RNA, 27 nt, Artificial Sequence
  Description of Artificial Sequence: Synthetic oligonucleotide
ggacagaggugccaggagaugcccuca

SEQ ID NO: 151952 - RNA, 27 nt, Artificial Sequence
  Description of Artificial Sequence: Synthetic oligonucleotide
uuaaaaagacaaaccauaucacuccuu

SEQ ID NO: 151953 - RNA, 27 nt, Artificial Sequence
  Description of Artificial Sequence: Synthetic oligonucleotide
cuuaaaaagacaaaccauaucacuccu

SEQ ID NO: 151954 - RNA, 27 nt, Artificial Sequence
  Description of Artificial Sequence: Synthetic oligonucleotide
gacaaccuuuaggaucuuuacugcaac

SEQ ID NO: 151955 - RNA, 27 nt, Artificial Sequence
  Description of Artificial Sequence: Synthetic oligonucleotide
gucgacaaccuuuaggaucuuuacugc

SEQ ID NO: 151956 - RNA, 27 nt, Artificial Sequence
  Description of Artificial Sequence: Synthetic oligonucleotide
acaauugccagguuguccuuugucaug

SEQ ID NO: 151957 - RNA, 27 nt, Artificial Sequence
  Description of Artificial Sequence: Synthetic oligonucleotide
ccucgcaccacugggucacaauugcca

SEQ ID NO: 151958 - RNA, 27 nt, Artificial Sequence
  Description of Artificial Sequence: Synthetic oligonucleotide
auuucaugucucuauggaugauguucu

SEQ ID NO: 151959 - RNA, 27 nt, Artificial Sequence
  Description of Artificial Sequence: Synthetic oligonucleotide
uggagaaauauauuguuggauuucaug

SEQ ID NO: 151960 - RNA, 27 nt, Artificial Sequence
  Description of Artificial Sequence: Synthetic oligonucleotide
agccuucauggagaaauauauuguugg

SEQ ID NO: 151961 - RNA, 27 nt, Artificial Sequence
  Description of Artificial Sequence: Synthetic oligonucleotide
accacuccagcgugacuuuacuguugc

SEQ ID NO: 151962 - RNA, 27 nt, Artificial Sequence
  Description of Artificial Sequence: Synthetic oligonucleotide
ccucucuuccuuuacuuucuucacaca

SEQ ID NO: 151963 - RNA, 27 nt, Artificial Sequence
  Description of Artificial Sequence: Synthetic oligonucleotide
gcccgaugcaaggauggcucggaagcg

SEQ ID NO: 151964 - RNA, 27 nt, Artificial Sequence
  Description of Artificial Sequence: Synthetic oligonucleotide
cacaguaggauauucaaccuccauuuc

SEQ ID NO: 151965 - RNA, 27 nt, Artificial Sequence
  Description of Artificial Sequence: Synthetic oligonucleotide
uuacacaguaggauauucaaccuccau

SEQ ID NO: 151966 - RNA, 27 nt, Artificial Sequence
  Description of Artificial Sequence: Synthetic oligonucleotide
uacacuacaagggaaaacucaaaaucu

SEQ ID NO: 151967 - RNA, 27 nt, Artificial Sequence
  Description of Artificial Sequence: Synthetic oligonucleotide
caaucaacaaagaacaaacaggauaaa

SEQ ID NO: 151968 - RNA, 27 nt, Artificial Sequence
  Description of Artificial Sequence: Synthetic oligonucleotide
uuucaaucaacaaagaacaaacaggau

SEQ ID NO: 151969 - RNA, 27 nt, Artificial Sequence
  Description of Artificial Sequence: Synthetic oligonucleotide
auggaagaaaaagaaggcuguagagaa

SEQ ID NO: 151970 - RNA, 27 nt, Artificial Sequence
  Description of Artificial Sequence: Synthetic oligonucleotide
uagaaggaagauuagcuauggaagaaa

SEQ ID NO: 151971 - RNA, 27 nt, Artificial Sequence
  Description of Artificial Sequence: Synthetic oligonucleotide
augaagcauucaacaggaagauuauuu

SEQ ID NO: 151972 - RNA, 27 nt, Artificial Sequence
  Description of Artificial Sequence: Synthetic oligonucleotide
caugaagcauucaacaggaagauuauu

SEQ ID NO: 151973 - RNA, 27 nt, Artificial Sequence
  Description of Artificial Sequence: Synthetic oligonucleotide
ucaaaguagaauucaagucaugaagca

SEQ ID NO: 151974 - RNA, 27 nt, Artificial Sequence
  Description of Artificial Sequence: Synthetic oligonucleotide
gucuguaguugcuucucucccucuuag

SEQ ID NO: 151975 - RNA, 27 nt, Artificial Sequence
  Description of Artificial Sequence: Synthetic oligonucleotide
guugaccuuggucugguaggagacggc

SEQ ID NO: 151976 - RNA, 27 nt, Artificial Sequence
  Description of Artificial Sequence: Synthetic oligonucleotide
gucgagauagucgggccgauugaucuc

SEQ ID NO: 151977 - RNA, 27 nt, Artificial Sequence
  Description of Artificial Sequence: Synthetic oligonucleotide
guuugggaagguuggauguucguccuc

SEQ ID NO: 151978 - RNA, 27 nt, Artificial Sequence
  Description of Artificial Sequence: Synthetic oligonucleotide
aguucuaagcuuggguuccgacccuaa

SEQ ID NO: 151979 - RNA, 27 nt, Artificial Sequence
  Description of Artificial Sequence: Synthetic oligonucleotide
uuaaaguucuaagcuuggguuccgacc

SEQ ID NO: 151980 - RNA, 27 nt, Artificial Sequence
  Description of Artificial Sequence: Synthetic oligonucleotide
guugcuuaaaguucuaagcuuggguuc

SEQ ID NO: 151981 - RNA, 27 nt, Artificial Sequence
  Description of Artificial Sequence: Synthetic oligonucleotide
gugguggucuuguugcuuaaaguucua

SEQ ID NO: 151982 - RNA, 27 nt, Artificial Sequence
  Description of Artificial Sequence: Synthetic oligonucleotide
acuuuauuucucgccacugaauaguag

SEQ ID NO: 151983 - RNA, 27 nt, Artificial Sequence
  Description of Artificial Sequence: Synthetic oligonucleotide
aacuuuauuucucgccacugaauagua

SEQ ID NO: 151984 - RNA, 27 nt, Artificial Sequence
  Description of Artificial Sequence: Synthetic oligonucleotide
ggaucauuuccuguuaucuguguuugu

SEQ ID NO: 151985 - RNA, 27 nt, Artificial Sequence
  Description of Artificial Sequence: Synthetic oligonucleotide
guuucauuucuucucuuuucuuaaggc

SEQ ID NO: 151986 - RNA, 27 nt, Artificial Sequence
  Description of Artificial Sequence: Synthetic oligonucleotide
ggaggauggaaacacacuccuucaguu

SEQ ID NO: 151987 - RNA, 27 nt, Artificial Sequence
  Description of Artificial Sequence: Synthetic oligonucleotide
ucaaagauuuucagucccgcggugaca

SEQ ID NO: 151988 - RNA, 27 nt, Artificial Sequence
  Description of Artificial Sequence: Synthetic oligonucleotide
ccugaacggcacgcuuauuucugcugu

SEQ ID NO: 151989 - RNA, 27 nt, Artificial Sequence
  Description of Artificial Sequence: Synthetic oligonucleotide
cuucuggacccugaacggcacgcuuau

SEQ ID NO: 151990 - RNA, 27 nt, Artificial Sequence
  Description of Artificial Sequence: Synthetic oligonucleotide
caagcagucuugagugacuguuucuuc

SEQ ID NO: 151991 - RNA, 27 nt, Artificial Sequence
  Description of Artificial Sequence: Synthetic oligonucleotide
ccaaagacauggaccuucuuccucuga

SEQ ID NO: 151992 - RNA, 27 nt, Artificial Sequence
  Description of Artificial Sequence: Synthetic oligonucleotide
guguuucaggcauauuuugaauacauc

SEQ ID NO: 151993 - RNA, 27 nt, Artificial Sequence
  Description of Artificial Sequence: Synthetic oligonucleotide
gagguacagagaaagggaggaaaauag

SEQ ID NO: 151994 - RNA, 27 nt, Artificial Sequence
  Description of Artificial Sequence: Synthetic oligonucleotide
ucuugucuugcucuaucuuucuuuggu

SEQ ID NO: 151995 - RNA, 27 nt, Artificial Sequence
  Description of Artificial Sequence: Synthetic oligonucleotide
uuucuugucuugcucuaucuuucuuug

SEQ ID NO: 151996 - RNA, 27 nt, Artificial Sequence
  Description of Artificial Sequence: Synthetic oligonucleotide
ggaucuuguacaaacaaaugcuuucuc

SEQ ID NO: 151997 - RNA, 27 nt, Artificial Sequence
  Description of Artificial Sequence: Synthetic oligonucleotide
ucugcaaguacguucguuuaacucaag

SEQ ID NO: 151998 - RNA, 27 nt, Artificial Sequence
  Description of Artificial Sequence: Synthetic oligonucleotide
ucuguaucgaucguucuguaucagucu

SEQ ID NO: 151999 - RNA, 27 nt, Artificial Sequence
  Description of Artificial Sequence: Synthetic oligonucleotide
auuuauuuuuauauauauauaauauau

SEQ ID NO: 152000 - RNA, 27 nt, Artificial Sequence
  Description of Artificial Sequence: Synthetic oligonucleotide
auauuuauuuuuauauauauauaauau

SEQ ID NO: 152001 - RNA, 27 nt, Artificial Sequence
  Description of Artificial Sequence: Synthetic oligonucleotide
cacagcagucaaauacauccagugaag

SEQ ID NO: 152002 - RNA, 27 nt, Artificial Sequence
  Description of Artificial Sequence: Synthetic oligonucleotide
gucucucaucuccuccucuucccuguc

SEQ ID NO: 152003 - RNA, 27 nt, Artificial Sequence
  Description of Artificial Sequence: Synthetic oligonucleotide
ccaagugggacaaaaaaaagaucaugc

SEQ ID NO: 152004 - RNA, 14 nt, Artificial Sequence
  Description of Artificial Sequence: Synthetic oligonucleotide
guauuuugaugagg

SEQ ID NO: 152005 - RNA, 12 nt, Artificial Sequence
  Description of Artificial Sequence: Synthetic oligonucleotide
ggcccagaugau

SEQ ID NO: 152006 - RNA, 14 nt, Artificial Sequence
  Description of Artificial Sequence: Synthetic oligonucleotide
gggaagaaaacuau

SEQ ID NO: 152007 - RNA, 15 nt, Artificial Sequence
  Description of Artificial Sequence: Synthetic oligonucleotide
guuuuaauuuauuuc

SEQ ID NO: 152008 - RNA, 12 nt, Artificial Sequence
  Description of Artificial Sequence: Synthetic oligonucleotide
acguagggaaau

SEQ ID NO: 152009 - RNA, 12 nt, Artificial Sequence
  Description of Artificial Sequence: Synthetic oligonucleotide
ccaggguuuacc

SEQ ID NO: 152010 - RNA, 11 nt, Artificial Sequence
  Description of Artificial Sequence: Synthetic oligonucleotide
agcaagguuua

SEQ ID NO: 152011 - RNA, 12 nt, Artificial Sequence
  Description of Artificial Sequence: Synthetic oligonucleotide
uguauuauguug

SEQ ID NO: 152012 - RNA, 15 nt, Artificial Sequence
  Description of Artificial Sequence: Synthetic oligonucleotide
uuuuaaucuuuguga

SEQ ID NO: 152013 - RNA, 14 nt, Artificial Sequence
  Description of Artificial Sequence: Synthetic oligonucleotide
uuaaucuuugugac

SEQ ID NO: 152014 - RNA, 13 nt, Artificial Sequence
  Description of Artificial Sequence: Synthetic oligonucleotide
gcugcuuaugucu

SEQ ID NO: 152015 - RNA, 14 nt, Artificial Sequence
  Description of Artificial Sequence: Synthetic oligonucleotide
aaguguuucagaag

SEQ ID NO: 152016 - RNA, 13 nt, Artificial Sequence
  Description of Artificial Sequence: Synthetic oligonucleotide
gaccaucaauaag

SEQ ID NO: 152017 - RNA, 13 nt, Artificial Sequence
  Description of Artificial Sequence: Synthetic oligonucleotide
ccaucaauaagga

SEQ ID NO: 152018 - RNA, 14 nt, Artificial Sequence
  Description of Artificial Sequence: Synthetic oligonucleotide
ucaauaaggaagaa

SEQ ID NO: 152019 - RNA, 14 nt, Artificial Sequence
  Description of Artificial Sequence: Synthetic oligonucleotide
aauaaggaagaagc

SEQ ID NO: 152020 - RNA, 13 nt, Artificial Sequence
  Description of Artificial Sequence: Synthetic oligonucleotide
aggaagaagcccu

SEQ ID NO: 152021 - RNA, 13 nt, Artificial Sequence
  Description of Artificial Sequence: Synthetic oligonucleotide
gcauaacuaaagg

SEQ ID NO: 152022 - RNA, 14 nt, Artificial Sequence
  Description of Artificial Sequence: Synthetic oligonucleotide
cauaacuaaaggug

SEQ ID NO: 152023 - RNA, 12 nt, Artificial Sequence
  Description of Artificial Sequence: Synthetic oligonucleotide
cuacaucacgcc

SEQ ID NO: 152024 - RNA, 12 nt, Artificial Sequence
  Description of Artificial Sequence: Synthetic oligonucleotide
acuggauuuaag

SEQ ID NO: 152025 - RNA, 12 nt, Artificial Sequence
  Description of Artificial Sequence: Synthetic oligonucleotide
cuggauuuaagc

SEQ ID NO: 152026 - RNA, 13 nt, Artificial Sequence
  Description of Artificial Sequence: Synthetic oligonucleotide
gauuuaagcagag

SEQ ID NO: 152027 - RNA, 13 nt, Artificial Sequence
  Description of Artificial Sequence: Synthetic oligonucleotide
auuuaagcagagu

SEQ ID NO: 152028 - RNA, 13 nt, Artificial Sequence
  Description of Artificial Sequence: Synthetic oligonucleotide
uuaagcagaguuc

SEQ ID NO: 152029 - RNA, 13 nt, Artificial Sequence
  Description of Artificial Sequence: Synthetic oligonucleotide
uaagcagaguuca

SEQ ID NO: 152030 - RNA, 14 nt, Artificial Sequence
  Description of Artificial Sequence: Synthetic oligonucleotide
agcagaguucaaaa

SEQ ID NO: 152031 - RNA, 12 nt, Artificial Sequence
  Description of Artificial Sequence: Synthetic oligonucleotide
cucagggucuga

SEQ ID NO: 152032 - RNA, 13 nt, Artificial Sequence
  Description of Artificial Sequence: Synthetic oligonucleotide
caagcaacuacau

SEQ ID NO: 152033 - RNA, 12 nt, Artificial Sequence
  Description of Artificial Sequence: Synthetic oligonucleotide
aucaauggcagc

SEQ ID NO: 152034 - RNA, 11 nt, Artificial Sequence
  Description of Artificial Sequence: Synthetic oligonucleotide
uuccagcccac

SEQ ID NO: 152035 - RNA, 12 nt, Artificial Sequence
  Description of Artificial Sequence: Synthetic oligonucleotide
cagcugagaaug

SEQ ID NO: 152036 - RNA, 13 nt, Artificial Sequence
  Description of Artificial Sequence: Synthetic oligonucleotide
aacguaucuccua

SEQ ID NO: 152037 - RNA, 14 nt, Artificial Sequence
  Description of Artificial Sequence: Synthetic oligonucleotide
ccuaaaauaauuuc

SEQ ID NO: 152038 - RNA, 13 nt, Artificial Sequence
  Description of Artificial Sequence: Synthetic oligonucleotide
uggaagauucagc

SEQ ID NO: 152039 - RNA, 12 nt, Artificial Sequence
  Description of Artificial Sequence: Synthetic oligonucleotide
uuaaacucuccu

SEQ ID NO: 152040 - RNA, 12 nt, Artificial Sequence
  Description of Artificial Sequence: Synthetic oligonucleotide
cagccuacaguu

SEQ ID NO: 152041 - RNA, 13 nt, Artificial Sequence
  Description of Artificial Sequence: Synthetic oligonucleotide
guuauguucaguc

SEQ ID NO: 152042 - RNA, 13 nt, Artificial Sequence
  Description of Artificial Sequence: Synthetic oligonucleotide
cacauacaaaaug

SEQ ID NO: 152043 - RNA, 9 nt, Artificial Sequence
  Description of Artificial Sequence: Synthetic oligonucleotide
uccuuuugc

SEQ ID NO: 152044 - RNA, 12 nt, Artificial Sequence
  Description of Artificial Sequence: Synthetic oligonucleotide
ugaccugugaag

SEQ ID NO: 152045 - RNA, 12 nt, Artificial Sequence
  Description of Artificial Sequence: Synthetic oligonucleotide
cuaucucacaca

SEQ ID NO: 152046 - RNA, 13 nt, Artificial Sequence
  Description of Artificial Sequence: Synthetic oligonucleotide
uguccucaauugu

SEQ ID NO: 152047 - RNA, 12 nt, Artificial Sequence
  Description of Artificial Sequence: Synthetic oligonucleotide
aaaccguagcug

SEQ ID NO: 152048 - RNA, 12 nt, Artificial Sequence
  Description of Artificial Sequence: Synthetic oligonucleotide
uagcuggcaagc

SEQ ID NO: 152049 - RNA, 14 nt, Artificial Sequence
  Description of Artificial Sequence: Synthetic oligonucleotide
uuguaugguuaaaa

SEQ ID NO: 152050 - RNA, 14 nt, Artificial Sequence
  Description of Artificial Sequence: Synthetic oligonucleotide
ugguuaaaagaugg

SEQ ID NO: 152051 - RNA, 13 nt, Artificial Sequence
  Description of Artificial Sequence: Synthetic oligonucleotide
cagggaauuauac

SEQ ID NO: 152052 - RNA, 12 nt, Artificial Sequence
  Description of Artificial Sequence: Synthetic oligonucleotide
acaaucuugcug

SEQ ID NO: 152053 - RNA, 13 nt, Artificial Sequence
  Description of Artificial Sequence: Synthetic oligonucleotide
ccaauaaugaaga

SEQ ID NO: 152054 - RNA, 13 nt, Artificial Sequence
  Description of Artificial Sequence: Synthetic oligonucleotide
acuuuggauguuc

SEQ ID NO: 152055 - RNA, 12 nt, Artificial Sequence
  Description of Artificial Sequence: Synthetic oligonucleotide
aaugcuuccacu

SEQ ID NO: 152056 - RNA, 11 nt, Artificial Sequence
  Description of Artificial Sequence: Synthetic oligonucleotide
gagaaaguuug

SEQ ID NO: 152057 - RNA, 11 nt, Artificial Sequence
  Description of Artificial Sequence: Synthetic oligonucleotide
aaagaacuacu

SEQ ID NO: 152058 - RNA, 12 nt, Artificial Sequence
  Description of Artificial Sequence: Synthetic oligonucleotide
uuagaaauacgg

SEQ ID NO: 152059 - RNA, 12 nt, Artificial Sequence
  Description of Artificial Sequence: Synthetic oligonucleotide
aacauggguaca

SEQ ID NO: 152060 - RNA, 14 nt, Artificial Sequence
  Description of Artificial Sequence: Synthetic oligonucleotide
aaagacacagaaga

SEQ ID NO: 152061 - RNA, 11 nt, Artificial Sequence
  Description of Artificial Sequence: Synthetic oligonucleotide
uaguagggagg

SEQ ID NO: 152062 - RNA, 12 nt, Artificial Sequence
  Description of Artificial Sequence: Synthetic oligonucleotide
gccuucugcagc

SEQ ID NO: 152063 - RNA, 10 nt, Artificial Sequence
  Description of Artificial Sequence: Synthetic oligonucleotide
ggucugguac

SEQ ID NO: 152064 - RNA, 12 nt, Artificial Sequence
  Description of Artificial Sequence: Synthetic oligonucleotide
cuaguccuuccg

SEQ ID NO: 152065 - RNA, 12 nt, Artificial Sequence
  Description of Artificial Sequence: Synthetic oligonucleotide
ccagugaauauu

SEQ ID NO: 152066 - RNA, 13 nt, Artificial Sequence
  Description of Artificial Sequence: Synthetic oligonucleotide
augaauucaaguu

SEQ ID NO: 152067 - RNA, 12 nt, Artificial Sequence
  Description of Artificial Sequence: Synthetic oligonucleotide
caggacacagau

SEQ ID NO: 152068 - RNA, 12 nt, Artificial Sequence
  Description of Artificial Sequence: Synthetic oligonucleotide
cucaaagcacag

SEQ ID NO: 152069 - RNA, 10 nt, Artificial Sequence
  Description of Artificial Sequence: Synthetic oligonucleotide
accacugcca

SEQ ID NO: 152070 - RNA, 13 nt, Artificial Sequence
  Description of Artificial Sequence: Synthetic oligonucleotide
gaaacuacuagug

SEQ ID NO: 152071 - RNA, 12 nt, Artificial Sequence
  Description of Artificial Sequence: Synthetic oligonucleotide
aagucggacagc

SEQ ID NO: 152072 - RNA, 13 nt, Artificial Sequence
  Description of Artificial Sequence: Synthetic oligonucleotide
gaaagcgaaaaau

SEQ ID NO: 152073 - RNA, 13 nt, Artificial Sequence
  Description of Artificial Sequence: Synthetic oligonucleotide
cccucugauuuag

SEQ ID NO: 152074 - RNA, 12 nt, Artificial Sequence
  Description of Artificial Sequence: Synthetic oligonucleotide
ugagcuauuuaa

SEQ ID NO: 152075 - RNA, 13 nt, Artificial Sequence
  Description of Artificial Sequence: Synthetic oligonucleotide
aaaaggugaaaaa

SEQ ID NO: 152076 - RNA, 14 nt, Artificial Sequence
  Description of Artificial Sequence: Synthetic oligonucleotide
gaaaaagcacuauu

SEQ ID NO: 152077 - RNA, 12 nt, Artificial Sequence
  Description of Artificial Sequence: Synthetic oligonucleotide
ggcugaaaagaa

SEQ ID NO: 152078 - RNA, 12 nt, Artificial Sequence
  Description of Artificial Sequence: Synthetic oligonucleotide
uaaacccuuaua

SEQ ID NO: 152079 - RNA, 13 nt, Artificial Sequence
  Description of Artificial Sequence: Synthetic oligonucleotide
cauacuauuagcc

SEQ ID NO: 152080 - RNA, 12 nt, Artificial Sequence
  Description of Artificial Sequence: Synthetic oligonucleotide
gacagaagcauu

SEQ ID NO: 152081 - RNA, 14 nt, Artificial Sequence
  Description of Artificial Sequence: Synthetic oligonucleotide
agagcaaauaagau

SEQ ID NO: 152082 - RNA, 14 nt, Artificial Sequence
  Description of Artificial Sequence: Synthetic oligonucleotide
ccaacauuuuucuc

SEQ ID NO: 152083 - RNA, 15 nt, Artificial Sequence
  Description of Artificial Sequence: Synthetic oligonucleotide
uuaaguaugagaaaa

SEQ ID NO: 152084 - RNA, 14 nt, Artificial Sequence
  Description of Artificial Sequence: Synthetic oligonucleotide
caggaauaaagaug

SEQ ID NO: 152085 - RNA, 13 nt, Artificial Sequence
  Description of Artificial Sequence: Synthetic oligonucleotide
aauuugaaugacc

SEQ ID NO: 152086 - RNA, 14 nt, Artificial Sequence
  Description of Artificial Sequence: Synthetic oligonucleotide
auguauaaagauag

SEQ ID NO: 152087 - RNA, 12 nt, Artificial Sequence
  Description of Artificial Sequence: Synthetic oligonucleotide
ggcuguaacuau

SEQ ID NO: 152088 - RNA, 11 nt, Artificial Sequence
  Description of Artificial Sequence: Synthetic oligonucleotide
ucugugaagug

SEQ ID NO: 152089 - RNA, 14 nt, Artificial Sequence
  Description of Artificial Sequence: Synthetic oligonucleotide
ccuuuaaggaaaug

SEQ ID NO: 152090 - RNA, 13 nt, Artificial Sequence
  Description of Artificial Sequence: Synthetic oligonucleotide
aaggauacaaaaa

SEQ ID NO: 152091 - RNA, 12 nt, Artificial Sequence
  Description of Artificial Sequence: Synthetic oligonucleotide
agaugcaauuug

SEQ ID NO: 152092 - RNA, 12 nt, Artificial Sequence
  Description of Artificial Sequence: Synthetic oligonucleotide
guucaaaacgaa

SEQ ID NO: 152093 - RNA, 11 nt, Artificial Sequence
  Description of Artificial Sequence: Synthetic oligonucleotide
gugaaaccuca

SEQ ID NO: 152094 - RNA, 13 nt, Artificial Sequence
  Description of Artificial Sequence: Synthetic oligonucleotide
acgaaagagaagc

SEQ ID NO: 152095 - RNA, 12 nt, Artificial Sequence
  Description of Artificial Sequence: Synthetic oligonucleotide
cuccacaagcgc

SEQ ID NO: 152096 - RNA, 14 nt, Artificial Sequence
  Description of Artificial Sequence: Synthetic oligonucleotide
gagaagauuccaaa

SEQ ID NO: 152097 - RNA, 13 nt, Artificial Sequence
  Description of Artificial Sequence: Synthetic oligonucleotide
aaucuggauucaa

SEQ ID NO: 152098 - RNA, 13 nt, Artificial Sequence
  Description of Artificial Sequence: Synthetic oligonucleotide
agaacagauuuga

SEQ ID NO: 152099 - RNA, 11 nt, Artificial Sequence
  Description of Artificial Sequence: Synthetic oligonucleotide
ccagagcugug

SEQ ID NO: 152100 - RNA, 12 nt, Artificial Sequence
  Description of Artificial Sequence: Synthetic oligonucleotide
ccucagauuguu

SEQ ID NO: 152101 - RNA, 12 nt, Artificial Sequence
  Description of Artificial Sequence: Synthetic oligonucleotide
cuauuuuaauua

SEQ ID NO: 152102 - RNA, 13 nt, Artificial Sequence
  Description of Artificial Sequence: Synthetic oligonucleotide
uuuaauuuauuaa

SEQ ID NO: 152103 - RNA, 12 nt, Artificial Sequence
  Description of Artificial Sequence: Synthetic oligonucleotide
augcaguuugaa

SEQ ID NO: 152104 - RNA, 11 nt, Artificial Sequence
  Description of Artificial Sequence: Synthetic oligonucleotide
caugcugcugg

SEQ ID NO: 152105 - RNA, 13 nt, Artificial Sequence
  Description of Artificial Sequence: Synthetic oligonucleotide
agaugugcauuuc

SEQ ID NO: 152106 - RNA, 12 nt, Artificial Sequence
  Description of Artificial Sequence: Synthetic oligonucleotide
ucaaaaccugug

SEQ ID NO: 152107 - RNA, 11 nt, Artificial Sequence
  Description of Artificial Sequence: Synthetic oligonucleotide
gaaugugggua

SEQ ID NO: 152108 - RNA, 10 nt, Artificial Sequence
  Description of Artificial Sequence: Synthetic oligonucleotide
auguggguag

SEQ ID NO: 152109 - RNA, 13 nt, Artificial Sequence
  Description of Artificial Sequence: Synthetic oligonucleotide
ugaaaaugagcau

SEQ ID NO: 152110 - RNA, 13 nt, Artificial Sequence
  Description of Artificial Sequence: Synthetic oligonucleotide
uugcuuuucaugu

SEQ ID NO: 152111 - RNA, 12 nt, Artificial Sequence
  Description of Artificial Sequence: Synthetic oligonucleotide
uguauuucuaua

SEQ ID NO: 152112 - RNA, 13 nt, Artificial Sequence
  Description of Artificial Sequence: Synthetic oligonucleotide
uuugauuaauguu

SEQ ID NO: 152113 - RNA, 12 nt, Artificial Sequence
  Description of Artificial Sequence: Synthetic oligonucleotide
caacguguauag

SEQ ID NO: 152114 - RNA, 12 nt, Artificial Sequence
  Description of Artificial Sequence: Synthetic oligonucleotide
cauauccuuggc

SEQ ID NO: 152115 - RNA, 13 nt, Artificial Sequence
  Description of Artificial Sequence: Synthetic oligonucleotide
uacuaacaucugg

SEQ ID NO: 152116 - RNA, 11 nt, Artificial Sequence
  Description of Artificial Sequence: Synthetic oligonucleotide
cauaaguugug

SEQ ID NO: 152117 - RNA, 12 nt, Artificial Sequence
  Description of Artificial Sequence: Synthetic oligonucleotide
gcaucauuuugg

SEQ ID NO: 152118 - RNA, 10 nt, Artificial Sequence
  Description of Artificial Sequence: Synthetic oligonucleotide
gcucuucuua

SEQ ID NO: 152119 - RNA, 10 nt, Artificial Sequence
  Description of Artificial Sequence: Synthetic oligonucleotide
agauuagguc

SEQ ID NO: 152120 - RNA, 12 nt, Artificial Sequence
  Description of Artificial Sequence: Synthetic oligonucleotide
auggaauugaaa

SEQ ID NO: 152121 - RNA, 13 nt, Artificial Sequence
  Description of Artificial Sequence: Synthetic oligonucleotide
cacacucauuccu

SEQ ID NO: 152122 - RNA, 12 nt, Artificial Sequence
  Description of Artificial Sequence: Synthetic oligonucleotide
uguagagguaac

SEQ ID NO: 152123 - RNA, 11 nt, Artificial Sequence
  Description of Artificial Sequence: Synthetic oligonucleotide
caaccacaugc

SEQ ID NO: 152124 - RNA, 12 nt, Artificial Sequence
  Description of Artificial Sequence: Synthetic oligonucleotide
ucggaaacaagu

SEQ ID NO: 152125 - RNA, 11 nt, Artificial Sequence
  Description of Artificial Sequence: Synthetic oligonucleotide
acucccaauaa

SEQ ID NO: 152126 - RNA, 13 nt, Artificial Sequence
  Description of Artificial Sequence: Synthetic oligonucleotide
aaugcuaagaaau

SEQ ID NO: 152127 - RNA, 11 nt, Artificial Sequence
  Description of Artificial Sequence: Synthetic oligonucleotide
gucuuucucua

SEQ ID NO: 152128 - RNA, 11 nt, Artificial Sequence
  Description of Artificial Sequence: Synthetic oligonucleotide
ugaauuucagg

SEQ ID NO: 152129 - RNA, 13 nt, Artificial Sequence
  Description of Artificial Sequence: Synthetic oligonucleotide
cgauucccucuca

SEQ ID NO: 152130 - RNA, 11 nt, Artificial Sequence
  Description of Artificial Sequence: Synthetic oligonucleotide
aggaaagugaa

SEQ ID NO: 152131 - RNA, 12 nt, Artificial Sequence
  Description of Artificial Sequence: Synthetic oligonucleotide
gaggcugcaugc

SEQ ID NO: 152132 - RNA, 11 nt, Artificial Sequence
  Description of Artificial Sequence: Synthetic oligonucleotide
ucucugaacag

SEQ ID NO: 152133 - RNA, 12 nt, Artificial Sequence
  Description of Artificial Sequence: Synthetic oligonucleotide
aacuuggcugua

SEQ ID NO: 152134 - RNA, 12 nt, Artificial Sequence
  Description of Artificial Sequence: Synthetic oligonucleotide
agaagccaaaau

SEQ ID NO: 152135 - RNA, 14 nt, Artificial Sequence
  Description of Artificial Sequence: Synthetic oligonucleotide
auuaaaagaagucc

SEQ ID NO: 152136 - RNA, 14 nt, Artificial Sequence
  Description of Artificial Sequence: Synthetic oligonucleotide
gaauccggauuauc

SEQ ID NO: 152137 - RNA, 12 nt, Artificial Sequence
  Description of Artificial Sequence: Synthetic oligonucleotide
aaugugacauca

SEQ ID NO: 152138 - RNA, 13 nt, Artificial Sequence
  Description of Artificial Sequence: Synthetic oligonucleotide
caucaaagcaagu

SEQ ID NO: 152139 - RNA, 11 nt, Artificial Sequence
  Description of Artificial Sequence: Synthetic oligonucleotide
agagagagaaa

SEQ ID NO: 152140 - RNA, 13 nt, Artificial Sequence
  Description of Artificial Sequence: Synthetic oligonucleotide
ucgcuguaguauu

SEQ ID NO: 152141 - RNA, 14 nt, Artificial Sequence
  Description of Artificial Sequence: Synthetic oligonucleotide
cgcuguaguauuua

SEQ ID NO: 152142 - RNA, 13 nt, Artificial Sequence
  Description of Artificial Sequence: Synthetic oligonucleotide
auuuaagcccaua

SEQ ID NO: 152143 - RNA, 15 nt, Artificial Sequence
  Description of Artificial Sequence: Synthetic oligonucleotide
auuaaaauaaacaug

SEQ ID NO: 152144 - RNA, 12 nt, Artificial Sequence
  Description of Artificial Sequence: Synthetic oligonucleotide
cuguucugaucg

SEQ ID NO: 152145 - RNA, 16 nt, Artificial Sequence
  Description of Artificial Sequence: Synthetic oligonucleotide
aaauaauuugaacuuu

SEQ ID NO: 152146 - RNA, 12 nt, Artificial Sequence
  Description of Artificial Sequence: Synthetic oligonucleotide
ugcgaccuuaau

SEQ ID NO: 152147 - RNA, 11 nt, Artificial Sequence
  Description of Artificial Sequence: Synthetic oligonucleotide
cugagaaagcu

SEQ ID NO: 152148 - RNA, 13 nt, Artificial Sequence
  Description of Artificial Sequence: Synthetic oligonucleotide
aguaaagaugcua

SEQ ID NO: 152149 - RNA, 12 nt, Artificial Sequence
  Description of Artificial Sequence: Synthetic oligonucleotide
cugcuuaauugc

SEQ ID NO: 152150 - RNA, 14 nt, Artificial Sequence
  Description of Artificial Sequence: Synthetic oligonucleotide
uaccauaugaauga

SEQ ID NO: 152151 - RNA, 12 nt, Artificial Sequence
  Description of Artificial Sequence: Synthetic oligonucleotide
aacuuucuuauc

SEQ ID NO: 152152 - RNA, 13 nt, Artificial Sequence
  Description of Artificial Sequence: Synthetic oligonucleotide
ccuugcaugacau

SEQ ID NO: 152153 - RNA, 14 nt, Artificial Sequence
  Description of Artificial Sequence: Synthetic oligonucleotide
ugaauuuguauaug

SEQ ID NO: 152154 - RNA, 12 nt, Artificial Sequence
  Description of Artificial Sequence: Synthetic oligonucleotide
gaauccuaguag

SEQ ID NO: 152155 - RNA, 10 nt, Artificial Sequence
  Description of Artificial Sequence: Synthetic oligonucleotide
gaaagggaag

SEQ ID NO: 152156 - RNA, 11 nt, Artificial Sequence
  Description of Artificial Sequence: Synthetic oligonucleotide
uaucggcaugc

SEQ ID NO: 152157 - RNA, 12 nt, Artificial Sequence
  Description of Artificial Sequence: Synthetic oligonucleotide
caccucauagua

SEQ ID NO: 152158 - RNA, 11 nt, Artificial Sequence
  Description of Artificial Sequence: Synthetic oligonucleotide
ccagaauugcc

SEQ ID NO: 152159 - RNA, 11 nt, Artificial Sequence
  Description of Artificial Sequence: Synthetic oligonucleotide
uggugaucugg

SEQ ID NO: 152160 - RNA, 12 nt, Artificial Sequence
  Description of Artificial Sequence: Synthetic oligonucleotide
gaucuggguaau

SEQ ID NO: 152161 - RNA, 12 nt, Artificial Sequence
  Description of Artificial Sequence: Synthetic oligonucleotide
ggaugugaugaa

SEQ ID NO: 152162 - RNA, 12 nt, Artificial Sequence
  Description of Artificial Sequence: Synthetic oligonucleotide
cauuuccacagc

SEQ ID NO: 152163 - RNA, 11 nt, Artificial Sequence
  Description of Artificial Sequence: Synthetic oligonucleotide
acagcuacacc

SEQ ID NO: 152164 - RNA, 12 nt, Artificial Sequence
  Description of Artificial Sequence: Synthetic oligonucleotide
ugcaguucuuac

SEQ ID NO: 152165 - RNA, 12 nt, Artificial Sequence
  Description of Artificial Sequence: Synthetic oligonucleotide
acgagaagaaga

SEQ ID NO: 152166 - RNA, 12 nt, Artificial Sequence
  Description of Artificial Sequence: Synthetic oligonucleotide
cgagaagaagau

SEQ ID NO: 152167 - RNA, 15 nt, Artificial Sequence
  Description of Artificial Sequence: Synthetic oligonucleotide
aagaagaucauuuac

SEQ ID NO: 152168 - RNA, 11 nt, Artificial Sequence
  Description of Artificial Sequence: Synthetic oligonucleotide
agaggaagagg

SEQ ID NO: 152169 - RNA, 12 nt, Artificial Sequence
  Description of Artificial Sequence: Synthetic oligonucleotide
gaggaagaggug

SEQ ID NO: 152170 - RNA, 13 nt, Artificial Sequence
  Description of Artificial Sequence: Synthetic oligonucleotide
cuacuuugagggc

SEQ ID NO: 152171 - RNA, 12 nt, Artificial Sequence
  Description of Artificial Sequence: Synthetic oligonucleotide
agggcaucuccu

SEQ ID NO: 152172 - RNA, 10 nt, Artificial Sequence
  Description of Artificial Sequence: Synthetic oligonucleotide
ggagugauau

SEQ ID NO: 152173 - RNA, 11 nt, Artificial Sequence
  Description of Artificial Sequence: Synthetic oligonucleotide
gagugauaugg

SEQ ID NO: 152174 - RNA, 12 nt, Artificial Sequence
  Description of Artificial Sequence: Synthetic oligonucleotide
ugcaguaaagau

SEQ ID NO: 152175 - RNA, 13 nt, Artificial Sequence
  Description of Artificial Sequence: Synthetic oligonucleotide
aguaaagauccua

SEQ ID NO: 152176 - RNA, 12 nt, Artificial Sequence
  Description of Artificial Sequence: Synthetic oligonucleotide
ugacaaaggaca

SEQ ID NO: 152177 - RNA, 13 nt, Artificial Sequence
  Description of Artificial Sequence: Synthetic oligonucleotide
gcaauugugaccc

SEQ ID NO: 152178 - RNA, 12 nt, Artificial Sequence
  Description of Artificial Sequence: Synthetic oligonucleotide
aacaucauccau

SEQ ID NO: 152179 - RNA, 12 nt, Artificial Sequence
  Description of Artificial Sequence: Synthetic oligonucleotide
ugaaauccaaca

SEQ ID NO: 152180 - RNA, 15 nt, Artificial Sequence
  Description of Artificial Sequence: Synthetic oligonucleotide
aacaauauauuucuc

SEQ ID NO: 152181 - RNA, 14 nt, Artificial Sequence
  Description of Artificial Sequence: Synthetic oligonucleotide
aacaguaaagucac

SEQ ID NO: 152182 - RNA, 14 nt, Artificial Sequence
  Description of Artificial Sequence: Synthetic oligonucleotide
ugugaagaaaguaa

SEQ ID NO: 152183 - RNA, 13 nt, Artificial Sequence
  Description of Artificial Sequence: Synthetic oligonucleotide
cuuccgagccauc

SEQ ID NO: 152184 - RNA, 12 nt, Artificial Sequence
  Description of Artificial Sequence: Synthetic oligonucleotide
aauggagguuga

SEQ ID NO: 152185 - RNA, 12 nt, Artificial Sequence
  Description of Artificial Sequence: Synthetic oligonucleotide
ggagguugaaua

SEQ ID NO: 152186 - RNA, 13 nt, Artificial Sequence
  Description of Artificial Sequence: Synthetic oligonucleotide
auuuugaguuuuc

SEQ ID NO: 152187 - RNA, 12 nt, Artificial Sequence
  Description of Artificial Sequence: Synthetic oligonucleotide
uauccuguuugu

SEQ ID NO: 152188 - RNA, 11 nt, Artificial Sequence
  Description of Artificial Sequence: Synthetic oligonucleotide
ccuguuuguuc

SEQ ID NO: 152189 - RNA, 10 nt, Artificial Sequence
  Description of Artificial Sequence: Synthetic oligonucleotide
cucuacagcc

SEQ ID NO: 152190 - RNA, 12 nt, Artificial Sequence
  Description of Artificial Sequence: Synthetic oligonucleotide
ucuuccauagcu

SEQ ID NO: 152191 - RNA, 12 nt, Artificial Sequence
  Description of Artificial Sequence: Synthetic oligonucleotide
auaaucuuccug

SEQ ID NO: 152192 - RNA, 12 nt, Artificial Sequence
  Description of Artificial Sequence: Synthetic oligonucleotide
uaaucuuccugu

SEQ ID NO: 152193 - RNA, 12 nt, Artificial Sequence
  Description of Artificial Sequence: Synthetic oligonucleotide
cuucaugacuug

SEQ ID NO: 152194 - RNA, 12 nt, Artificial Sequence
  Description of Artificial Sequence: Synthetic oligonucleotide
aagagggagaga

SEQ ID NO: 152195 - RNA, 12 nt, Artificial Sequence
  Description of Artificial Sequence: Synthetic oligonucleotide
cgucuccuacca

SEQ ID NO: 152196 - RNA, 12 nt, Artificial Sequence
  Description of Artificial Sequence: Synthetic oligonucleotide
gaucaaucggcc

SEQ ID NO: 152197 - RNA, 12 nt, Artificial Sequence
  Description of Artificial Sequence: Synthetic oligonucleotide
ggacgaacaucc

SEQ ID NO: 152198 - RNA, 11 nt, Artificial Sequence
  Description of Artificial Sequence: Synthetic oligonucleotide
agggucggaac

SEQ ID NO: 152199 - RNA, 10 nt, Artificial Sequence
  Description of Artificial Sequence: Synthetic oligonucleotide
ucggaaccca

SEQ ID NO: 152200 - RNA, 11 nt, Artificial Sequence
  Description of Artificial Sequence: Synthetic oligonucleotide
acccaagcuua

SEQ ID NO: 152201 - RNA, 14 nt, Artificial Sequence
  Description of Artificial Sequence: Synthetic oligonucleotide
gaacuuuaagcaac

SEQ ID NO: 152202 - RNA, 11 nt, Artificial Sequence
  Description of Artificial Sequence: Synthetic oligonucleotide
acuauucagug

SEQ ID NO: 152203 - RNA, 11 nt, Artificial Sequence
  Description of Artificial Sequence: Synthetic oligonucleotide
cuauucagugg

SEQ ID NO: 152204 - RNA, 13 nt, Artificial Sequence
  Description of Artificial Sequence: Synthetic oligonucleotide
aaacacagauaac

SEQ ID NO: 152205 - RNA, 12 nt, Artificial Sequence
  Description of Artificial Sequence: Synthetic oligonucleotide
cuuaagaaaaga

SEQ ID NO: 152206 - RNA, 12 nt, Artificial Sequence
  Description of Artificial Sequence: Synthetic oligonucleotide
cugaaggagugu

SEQ ID NO: 152207 - RNA, 10 nt, Artificial Sequence
  Description of Artificial Sequence: Synthetic oligonucleotide
ucaccgcggg

SEQ ID NO: 152208 - RNA, 14 nt, Artificial Sequence
  Description of Artificial Sequence: Synthetic oligonucleotide
agcagaaauaagcg

SEQ ID NO: 152209 - RNA, 12 nt, Artificial Sequence
  Description of Artificial Sequence: Synthetic oligonucleotide
aagcgugccguu

SEQ ID NO: 152210 - RNA, 12 nt, Artificial Sequence
  Description of Artificial Sequence: Synthetic oligonucleotide
agaaacagucac

SEQ ID NO: 152211 - RNA, 12 nt, Artificial Sequence
  Description of Artificial Sequence: Synthetic oligonucleotide
agaggaagaagg

SEQ ID NO: 152212 - RNA, 14 nt, Artificial Sequence
  Description of Artificial Sequence: Synthetic oligonucleotide
uguauucaaaauau

SEQ ID NO: 152213 - RNA, 13 nt, Artificial Sequence
  Description of Artificial Sequence: Synthetic oligonucleotide
auuuuccucccuu

SEQ ID NO: 152214 - RNA, 13 nt, Artificial Sequence
  Description of Artificial Sequence: Synthetic oligonucleotide
caaagaaagauag

SEQ ID NO: 152215 - RNA, 12 nt, Artificial Sequence
  Description of Artificial Sequence: Synthetic oligonucleotide
aagaaagauaga

SEQ ID NO: 152216 - RNA, 13 nt, Artificial Sequence
  Description of Artificial Sequence: Synthetic oligonucleotide
gaaagcauuuguu

SEQ ID NO: 152217 - RNA, 13 nt, Artificial Sequence
  Description of Artificial Sequence: Synthetic oligonucleotide
ugaguuaaacgaa

SEQ ID NO: 152218 - RNA, 12 nt, Artificial Sequence
  Description of Artificial Sequence: Synthetic oligonucleotide
acugauacagaa

SEQ ID NO: 152219 - RNA, 12 nt, Artificial Sequence
  Description of Artificial Sequence: Synthetic oligonucleotide
auauuauauaua

SEQ ID NO: 152220 - RNA, 12 nt, Artificial Sequence
  Description of Artificial Sequence: Synthetic oligonucleotide
auuauauauaua

SEQ ID NO: 152221 - RNA, 12 nt, Artificial Sequence
  Description of Artificial Sequence: Synthetic oligonucleotide
ucacuggaugua

SEQ ID NO: 152222 - RNA, 12 nt, Artificial Sequence
  Description of Artificial Sequence: Synthetic oligonucleotide
cagggaagagga

SEQ ID NO: 152223 - RNA, 15 nt, Artificial Sequence
  Description of Artificial Sequence: Synthetic oligonucleotide
augaucuuuuuuuug

SEQ ID NO: 152224 - RNA, 11 nt, Artificial Sequence
  Description of Artificial Sequence: Synthetic oligonucleotide
aguucacggcc

SEQ ID NO: 152225 - RNA, 13 nt, Artificial Sequence
  Description of Artificial Sequence: Synthetic oligonucleotide
caccaucacacca

SEQ ID NO: 152226 - RNA, 11 nt, Artificial Sequence
  Description of Artificial Sequence: Synthetic oligonucleotide
ccugcggguuu

SEQ ID NO: 152227 - RNA, 10 nt, Artificial Sequence
  Description of Artificial Sequence: Synthetic oligonucleotide
auccaguuug

SEQ ID NO: 152228 - RNA, 13 nt, Artificial Sequence
  Description of Artificial Sequence: Synthetic oligonucleotide
guuaaggacuucu

SEQ ID NO: 152229 - RNA, 13 nt, Artificial Sequence
  Description of Artificial Sequence: Synthetic oligonucleotide
cagugggacagag

SEQ ID NO: 152230 - RNA, 14 nt, Artificial Sequence
  Description of Artificial Sequence: Synthetic oligonucleotide
aauuuguuauugug

SEQ ID NO: 152231 - RNA, 13 nt, Artificial Sequence
  Description of Artificial Sequence: Synthetic oligonucleotide
uucaaaugcauuu

SEQ ID NO: 152232 - RNA, 10 nt, Artificial Sequence
  Description of Artificial Sequence: Synthetic oligonucleotide
caggaaagcc

SEQ ID NO: 152233 - RNA, 11 nt, Artificial Sequence
  Description of Artificial Sequence: Synthetic oligonucleotide
aggaaagcccu

SEQ ID NO: 152234 - RNA, 12 nt, Artificial Sequence
  Description of Artificial Sequence: Synthetic oligonucleotide
cccagcauggcc

SEQ ID NO: 152235 - RNA, 11 nt, Artificial Sequence
  Description of Artificial Sequence: Synthetic oligonucleotide
cuucucccuga

SEQ ID NO: 152236 - RNA, 12 nt, Artificial Sequence
  Description of Artificial Sequence: Synthetic oligonucleotide
gaagaagcccuu

SEQ ID NO: 152237 - RNA, 12 nt, Artificial Sequence
  Description of Artificial Sequence: Synthetic oligonucleotide
agaagcccuuca

SEQ ID NO: 152238 - RNA, 11 nt, Artificial Sequence
  Description of Artificial Sequence: Synthetic oligonucleotide
gcccuucagcg

SEQ ID NO: 152239 - RNA, 11 nt, Artificial Sequence
  Description of Artificial Sequence: Synthetic oligonucleotide
ccuucagcggc

SEQ ID NO: 152240 - RNA, 12 nt, Artificial Sequence
  Description of Artificial Sequence: Synthetic oligonucleotide
ucagcggccagu

SEQ ID NO: 152241 - RNA, 12 nt, Artificial Sequence
  Description of Artificial Sequence: Synthetic oligonucleotide
ugaaaagcuccg

SEQ ID NO: 152242 - RNA, 11 nt, Artificial Sequence
  Description of Artificial Sequence: Synthetic oligonucleotide
aaaagcuccgg

SEQ ID NO: 152243 - RNA, 13 nt, Artificial Sequence
  Description of Artificial Sequence: Synthetic oligonucleotide
agucaacagucug

SEQ ID NO: 152244 - RNA, 13 nt, Artificial Sequence
  Description of Artificial Sequence: Synthetic oligonucleotide
cagaguucaaaag

SEQ ID NO: 152245 - RNA, 13 nt, Artificial Sequence
  Description of Artificial Sequence: Synthetic oligonucleotide
agaguucaaaagc

SEQ ID NO: 152246 - RNA, 12 nt, Artificial Sequence
  Description of Artificial Sequence: Synthetic oligonucleotide
uucaaaagcccu

SEQ ID NO: 152247 - RNA, 12 nt, Artificial Sequence
  Description of Artificial Sequence: Synthetic oligonucleotide
ucaaaagcccuu

SEQ ID NO: 152248 - RNA, 12 nt, Artificial Sequence
  Description of Artificial Sequence: Synthetic oligonucleotide
aaaagcccuuca

SEQ ID NO: 152249 - RNA, 12 nt, Artificial Sequence
  Description of Artificial Sequence: Synthetic oligonucleotide
aaagcccuucag

SEQ ID NO: 152250 - RNA, 13 nt, Artificial Sequence
  Description of Artificial Sequence: Synthetic oligonucleotide
gugaagccgcucg

SEQ ID NO: 152251 - RNA, 12 nt, Artificial Sequence
  Description of Artificial Sequence: Synthetic oligonucleotide
cacgccagucaa

SEQ ID NO: 152252 - RNA, 13 nt, Artificial Sequence
  Description of Artificial Sequence: Synthetic oligonucleotide
uucuuggugcgug

SEQ ID NO: 152253 - RNA, 14 nt, Artificial Sequence
  Description of Artificial Sequence: Synthetic oligonucleotide
auuggauucaucag

SEQ ID NO: 152254 - RNA, 13 nt, Artificial Sequence
  Description of Artificial Sequence: Synthetic oligonucleotide
uggaauaccuaag

SEQ ID NO: 152255 - RNA, 12 nt, Artificial Sequence
  Description of Artificial Sequence: Synthetic oligonucleotide
auuugaggcuca

SEQ ID NO: 152256 - RNA, 11 nt, Artificial Sequence
  Description of Artificial Sequence: Synthetic oligonucleotide
ucuacaauugg

SEQ ID NO: 152257 - RNA, 12 nt, Artificial Sequence
  Description of Artificial Sequence: Synthetic oligonucleotide
uaguuaggagcc

SEQ ID NO: 152258 - RNA, 13 nt, Artificial Sequence
  Description of Artificial Sequence: Synthetic oligonucleotide
agucaauauccac

SEQ ID NO: 152259 - RNA, 13 nt, Artificial Sequence
  Description of Artificial Sequence: Synthetic oligonucleotide
auguucagucaca

SEQ ID NO: 152260 - RNA, 12 nt, Artificial Sequence
  Description of Artificial Sequence: Synthetic oligonucleotide
acacacacauac

SEQ ID NO: 152261 - RNA, 12 nt, Artificial Sequence
  Description of Artificial Sequence: Synthetic oligonucleotide
uuccuuuugcuu

SEQ ID NO: 152262 - RNA, 16 nt, Artificial Sequence
  Description of Artificial Sequence: Synthetic oligonucleotide
uuuuaaaguaauuuuu

SEQ ID NO: 152263 - RNA, 13 nt, Artificial Sequence
  Description of Artificial Sequence: Synthetic oligonucleotide
caacagucaaugg

SEQ ID NO: 152264 - RNA, 13 nt, Artificial Sequence
  Description of Artificial Sequence: Synthetic oligonucleotide
ucgacaaaccaau

SEQ ID NO: 152265 - RNA, 12 nt, Artificial Sequence
  Description of Artificial Sequence: Synthetic oligonucleotide
acugcuaccacu

SEQ ID NO: 152266 - RNA, 13 nt, Artificial Sequence
  Description of Artificial Sequence: Synthetic oligonucleotide
gcaagcggucuua

SEQ ID NO: 152267 - RNA, 13 nt, Artificial Sequence
  Description of Artificial Sequence: Synthetic oligonucleotide
ggucuuaccggcu

SEQ ID NO: 152268 - RNA, 11 nt, Artificial Sequence
  Description of Artificial Sequence: Synthetic oligonucleotide
gauggguuacc

SEQ ID NO: 152269 - RNA, 11 nt, Artificial Sequence
  Description of Artificial Sequence: Synthetic oligonucleotide
guuaccugcga

SEQ ID NO: 152270 - RNA, 12 nt, Artificial Sequence
  Description of Artificial Sequence: Synthetic oligonucleotide
aaucuugcugag

SEQ ID NO: 152271 - RNA, 13 nt, Artificial Sequence
  Description of Artificial Sequence: Synthetic oligonucleotide
agcauaaaacagu

SEQ ID NO: 152272 - RNA, 12 nt, Artificial Sequence
  Description of Artificial Sequence: Synthetic oligonucleotide
guccuuuauccu

SEQ ID NO: 152273 - RNA, 12 nt, Artificial Sequence
  Description of Artificial Sequence: Synthetic oligonucleotide
caacgcaaguug

SEQ ID NO: 152274 - RNA, 13 nt, Artificial Sequence
  Description of Artificial Sequence: Synthetic oligonucleotide
aaacugaaaccau

SEQ ID NO: 152275 - RNA, 14 nt, Artificial Sequence
  Description of Artificial Sequence: Synthetic oligonucleotide
acuuuguuaaauau

SEQ ID NO: 152276 - RNA, 14 nt, Artificial Sequence
  Description of Artificial Sequence: Synthetic oligonucleotide
guauauuaaaaguu

SEQ ID NO: 152277 - RNA, 13 nt, Artificial Sequence
  Description of Artificial Sequence: Synthetic oligonucleotide
guuuugacuuaac

SEQ ID NO: 152278 - RNA, 13 nt, Artificial Sequence
  Description of Artificial Sequence: Synthetic oligonucleotide
gcaaacucagcac

SEQ ID NO: 152279 - RNA, 11 nt, Artificial Sequence
  Description of Artificial Sequence: Synthetic oligonucleotide
ugcugaccuca

SEQ ID NO: 152280 - RNA, 14 nt, Artificial Sequence
  Description of Artificial Sequence: Synthetic oligonucleotide
uuuauucagaucgc

SEQ ID NO: 152281 - RNA, 13 nt, Artificial Sequence
  Description of Artificial Sequence: Synthetic oligonucleotide
aggguucugggau

SEQ ID NO: 152282 - RNA, 15 nt, Artificial Sequence
  Description of Artificial Sequence: Synthetic oligonucleotide
auauuggaaauuaug

SEQ ID NO: 152283 - RNA, 13 nt, Artificial Sequence
  Description of Artificial Sequence: Synthetic oligonucleotide
auggaagcacuag

SEQ ID NO: 152284 - RNA, 13 nt, Artificial Sequence
  Description of Artificial Sequence: Synthetic oligonucleotide
guuuuuaugugga

SEQ ID NO: 152285 - RNA, 12 nt, Artificial Sequence
  Description of Artificial Sequence: Synthetic oligonucleotide
ggaauugguaga

SEQ ID NO: 152286 - RNA, 13 nt, Artificial Sequence
  Description of Artificial Sequence: Synthetic oligonucleotide
uuagacuuggaga

SEQ ID NO: 152287 - RNA, 13 nt, Artificial Sequence
  Description of Artificial Sequence: Synthetic oligonucleotide
uuacaguauucca

SEQ ID NO: 152288 - RNA, 15 nt, Artificial Sequence
  Description of Artificial Sequence: Synthetic oligonucleotide
ccacugaugaauuaa

SEQ ID NO: 152289 - RNA, 12 nt, Artificial Sequence
  Description of Artificial Sequence: Synthetic oligonucleotide
ccacaucaucac

SEQ ID NO: 152290 - RNA, 13 nt, Artificial Sequence
  Description of Artificial Sequence: Synthetic oligonucleotide
cucaccaaacaga

SEQ ID NO: 152291 - RNA, 12 nt, Artificial Sequence
  Description of Artificial Sequence: Synthetic oligonucleotide
ggaacaugaugg

SEQ ID NO: 152292 - RNA, 12 nt, Artificial Sequence
  Description of Artificial Sequence: Synthetic oligonucleotide
cauguagacugc

SEQ ID NO: 152293 - RNA, 13 nt, Artificial Sequence
  Description of Artificial Sequence: Synthetic oligonucleotide
ggaucuauuuaug

SEQ ID NO: 152294 - RNA, 12 nt, Artificial Sequence
  Description of Artificial Sequence: Synthetic oligonucleotide
gcacuauuauca

SEQ ID NO: 152295 - RNA, 11 nt, Artificial Sequence
  Description of Artificial Sequence: Synthetic oligonucleotide
aucaguucugc

SEQ ID NO: 152296 - RNA, 13 nt, Artificial Sequence
  Description of Artificial Sequence: Synthetic oligonucleotide
agauuaaaccuac

SEQ ID NO: 152297 - RNA, 13 nt, Artificial Sequence
  Description of Artificial Sequence: Synthetic oligonucleotide
auaaaauccuucu

SEQ ID NO: 152298 - RNA, 12 nt, Artificial Sequence
  Description of Artificial Sequence: Synthetic oligonucleotide
aaugcuguagac

SEQ ID NO: 152299 - RNA, 13 nt, Artificial Sequence
  Description of Artificial Sequence: Synthetic oligonucleotide
uugauaggaauag

SEQ ID NO: 152300 - RNA, 11 nt, Artificial Sequence
  Description of Artificial Sequence: Synthetic oligonucleotide
aauggcccuga

SEQ ID NO: 152301 - RNA, 11 nt, Artificial Sequence
  Description of Artificial Sequence: Synthetic oligonucleotide
uuccucaagca

SEQ ID NO: 152302 - RNA, 10 nt, Artificial Sequence
  Description of Artificial Sequence: Synthetic oligonucleotide
guucagccca

SEQ ID NO: 152303 - RNA, 11 nt, Artificial Sequence
  Description of Artificial Sequence: Synthetic oligonucleotide
gcugcugaacc

SEQ ID NO: 152304 - RNA, 12 nt, Artificial Sequence
  Description of Artificial Sequence: Synthetic oligonucleotide
aaguucucuuca

SEQ ID NO: 152305 - RNA, 11 nt, Artificial Sequence
  Description of Artificial Sequence: Synthetic oligonucleotide
ccagccuagag

SEQ ID NO: 152306 - RNA, 13 nt, Artificial Sequence
  Description of Artificial Sequence: Synthetic oligonucleotide
cucugugaagugu

SEQ ID NO: 152307 - RNA, 14 nt, Artificial Sequence
  Description of Artificial Sequence: Synthetic oligonucleotide
ugagaaaauuucaa

SEQ ID NO: 152308 - RNA, 11 nt, Artificial Sequence
  Description of Artificial Sequence: Synthetic oligonucleotide
aauccuccuga

SEQ ID NO: 152309 - RNA, 12 nt, Artificial Sequence
  Description of Artificial Sequence: Synthetic oligonucleotide
gugacaucauau

SEQ ID NO: 152310 - RNA, 13 nt, Artificial Sequence
  Description of Artificial Sequence: Synthetic oligonucleotide
aaucuucaucaua

SEQ ID NO: 152311 - RNA, 13 nt, Artificial Sequence
  Description of Artificial Sequence: Synthetic oligonucleotide
gacuagcuauuaa

SEQ ID NO: 152312 - RNA, 14 nt, Artificial Sequence
  Description of Artificial Sequence: Synthetic oligonucleotide
ucucuacuaaaaau

SEQ ID NO: 152313 - RNA, 12 nt, Artificial Sequence
  Description of Artificial Sequence: Synthetic oligonucleotide
ucuaucucgccu

SEQ ID NO: 152314 - RNA, 13 nt, Artificial Sequence
  Description of Artificial Sequence: Synthetic oligonucleotide
cuucgguccaguu

SEQ ID NO: 152315 - RNA, 11 nt, Artificial Sequence
  Description of Artificial Sequence: Synthetic oligonucleotide
gauguagccgc

SEQ ID NO: 152316 - RNA, 12 nt, Artificial Sequence
  Description of Artificial Sequence: Synthetic oligonucleotide
ugaggagacuug

SEQ ID NO: 152317 - RNA, 12 nt, Artificial Sequence
  Description of Artificial Sequence: Synthetic oligonucleotide
gaguagugagga

SEQ ID NO: 152318 - RNA, 14 nt, Artificial Sequence
  Description of Artificial Sequence: Synthetic oligonucleotide
cagaugaguacaaa

SEQ ID NO: 152319 - RNA, 13 nt, Artificial Sequence
  Description of Artificial Sequence: Synthetic oligonucleotide
guuguuaaugggc

SEQ ID NO: 152320 - RNA, 13 nt, Artificial Sequence
  Description of Artificial Sequence: Synthetic oligonucleotide
uuuuuaauuuauu

SEQ ID NO: 152321 - RNA, 12 nt, Artificial Sequence
  Description of Artificial Sequence: Synthetic oligonucleotide
uauuuaaauaug

SEQ ID NO: 152322 - RNA, 13 nt, Artificial Sequence
  Description of Artificial Sequence: Synthetic oligonucleotide
uauccuuuguuuc

SEQ ID NO: 152323 - RNA, 14 nt, Artificial Sequence
  Description of Artificial Sequence: Synthetic oligonucleotide
cgucuaaguguuug

SEQ ID NO: 152324 - RNA, 12 nt, Artificial Sequence
  Description of Artificial Sequence: Synthetic oligonucleotide
accugugacaaa

SEQ ID NO: 152325 - RNA, 13 nt, Artificial Sequence
  Description of Artificial Sequence: Synthetic oligonucleotide
ccaggcugaauua

SEQ ID NO: 152326 - RNA, 14 nt, Artificial Sequence
  Description of Artificial Sequence: Synthetic oligonucleotide
gucauucuuacaau

SEQ ID NO: 152327 - RNA, 15 nt, Artificial Sequence
  Description of Artificial Sequence: Synthetic oligonucleotide
ucauucuuacaauug

SEQ ID NO: 152328 - RNA, 12 nt, Artificial Sequence
  Description of Artificial Sequence: Synthetic oligonucleotide
cagagaguguac

SEQ ID NO: 152329 - RNA, 12 nt, Artificial Sequence
  Description of Artificial Sequence: Synthetic oligonucleotide
agaacucagcag

SEQ ID NO: 152330 - RNA, 13 nt, Artificial Sequence
  Description of Artificial Sequence: Synthetic oligonucleotide
uuuauuuucagua

SEQ ID NO: 152331 - RNA, 12 nt, Artificial Sequence
  Description of Artificial Sequence: Synthetic oligonucleotide
ucuuaaauggaa

SEQ ID NO: 152332 - RNA, 13 nt, Artificial Sequence
  Description of Artificial Sequence: Synthetic oligonucleotide
ugccuaaaauugu

SEQ ID NO: 152333 - RNA, 12 nt, Artificial Sequence
  Description of Artificial Sequence: Synthetic oligonucleotide
agacugugagcu

SEQ ID NO: 152334 - RNA, 14 nt, Artificial Sequence
  Description of Artificial Sequence: Synthetic oligonucleotide
ugcuuuuuauuaau

SEQ ID NO: 152335 - RNA, 13 nt, Artificial Sequence
  Description of Artificial Sequence: Synthetic oligonucleotide
cucuucuuacauu

SEQ ID NO: 152336 - RNA, 15 nt, Artificial Sequence
  Description of Artificial Sequence: Synthetic oligonucleotide
cauuuguaaaaaugu

SEQ ID NO: 152337 - RNA, 15 nt, Artificial Sequence
  Description of Artificial Sequence: Synthetic oligonucleotide
aucuuaauucauauu

SEQ ID NO: 152338 - RNA, 13 nt, Artificial Sequence
  Description of Artificial Sequence: Synthetic oligonucleotide
gaacuaaucauga

SEQ ID NO: 152339 - RNA, 12 nt, Artificial Sequence
  Description of Artificial Sequence: Synthetic oligonucleotide
ucugcucuuggg

SEQ ID NO: 152340 - RNA, 13 nt, Artificial Sequence
  Description of Artificial Sequence: Synthetic oligonucleotide
caguagcuuugag

SEQ ID NO: 152341 - RNA, 14 nt, Artificial Sequence
  Description of Artificial Sequence: Synthetic oligonucleotide
cacguaauauuuca

SEQ ID NO: 152342 - RNA, 13 nt, Artificial Sequence
  Description of Artificial Sequence: Synthetic oligonucleotide
uauucucuucacu

SEQ ID NO: 152343 - RNA, 14 nt, Artificial Sequence
  Description of Artificial Sequence: Synthetic oligonucleotide
cuaaugcuaagaaa

SEQ ID NO: 152344 - RNA, 12 nt, Artificial Sequence
  Description of Artificial Sequence: Synthetic oligonucleotide
gcugaaaaucaa

SEQ ID NO: 152345 - RNA, 14 nt, Artificial Sequence
  Description of Artificial Sequence: Synthetic oligonucleotide
aauaugauuacuuu

SEQ ID NO: 152346 - RNA, 14 nt, Artificial Sequence
  Description of Artificial Sequence: Synthetic oligonucleotide
cauuuuguucuaca

SEQ ID NO: 152347 - RNA, 12 nt, Artificial Sequence
  Description of Artificial Sequence: Synthetic oligonucleotide
cccgggacucuc

SEQ ID NO: 152348 - RNA, 14 nt, Artificial Sequence
  Description of Artificial Sequence: Synthetic oligonucleotide
ccuuuaaaguaaag

SEQ ID NO: 152349 - RNA, 13 nt, Artificial Sequence
  Description of Artificial Sequence: Synthetic oligonucleotide
ucuggaagccugg

SEQ ID NO: 152350 - RNA, 14 nt, Artificial Sequence
  Description of Artificial Sequence: Synthetic oligonucleotide
aaaacaaaagagag

SEQ ID NO: 152351 - RNA, 13 nt, Artificial Sequence
  Description of Artificial Sequence: Synthetic oligonucleotide
aucaguuaugccg

SEQ ID NO: 152352 - RNA, 13 nt, Artificial Sequence
  Description of Artificial Sequence: Synthetic oligonucleotide
uaaaagaagucca

SEQ ID NO: 152353 - RNA, 11 nt, Artificial Sequence
  Description of Artificial Sequence: Synthetic oligonucleotide
aggugagguua

SEQ ID NO: 152354 - RNA, 11 nt, Artificial Sequence
  Description of Artificial Sequence: Synthetic oligonucleotide
gggaagaggac

SEQ ID NO: 152355 - RNA, 13 nt, Artificial Sequence
  Description of Artificial Sequence: Synthetic oligonucleotide
aagcaaguauugu

SEQ ID NO: 152356 - RNA, 12 nt, Artificial Sequence
  Description of Artificial Sequence: Synthetic oligonucleotide
auuguagcacuc

SEQ ID NO: 152357 - RNA, 14 nt, Artificial Sequence
  Description of Artificial Sequence: Synthetic oligonucleotide
acaaaaccacaaau

SEQ ID NO: 152358 - RNA, 12 nt, Artificial Sequence
  Description of Artificial Sequence: Synthetic oligonucleotide
uaagcccauaca

SEQ ID NO: 152359 - RNA, 11 nt, Artificial Sequence
  Description of Artificial Sequence: Synthetic oligonucleotide
agcccauacag

SEQ ID NO: 152360 - RNA, 12 nt, Artificial Sequence
  Description of Artificial Sequence: Synthetic oligonucleotide
cagaaaccuucc

SEQ ID NO: 152361 - RNA, 10 nt, Artificial Sequence
  Description of Artificial Sequence: Synthetic oligonucleotide
guauaccuac

SEQ ID NO: 152362 - RNA, 13 nt, Artificial Sequence
  Description of Artificial Sequence: Synthetic oligonucleotide
gccaguuuucgga

SEQ ID NO: 152363 - RNA, 9 nt, Artificial Sequence
  Description of Artificial Sequence: Synthetic oligonucleotide
ggaacaggg

SEQ ID NO: 152364 - RNA, 13 nt, Artificial Sequence
  Description of Artificial Sequence: Synthetic oligonucleotide
uuaacuuuccagu

SEQ ID NO: 152365 - RNA, 14 nt, Artificial Sequence
  Description of Artificial Sequence: Synthetic oligonucleotide
aaaguuugguuuug

SEQ ID NO: 152366 - RNA, 12 nt, Artificial Sequence
  Description of Artificial Sequence: Synthetic oligonucleotide
cuucccacugua

SEQ ID NO: 152367 - RNA, 13 nt, Artificial Sequence
  Description of Artificial Sequence: Synthetic oligonucleotide
ugauaccauauga

SEQ ID NO: 152368 - RNA, 11 nt, Artificial Sequence
  Description of Artificial Sequence: Synthetic oligonucleotide
aacaugggcug

SEQ ID NO: 152369 - RNA, 13 nt, Artificial Sequence
  Description of Artificial Sequence: Synthetic oligonucleotide
caacuuuuucaua

SEQ ID NO: 152370 - RNA, 12 nt, Artificial Sequence
  Description of Artificial Sequence: Synthetic oligonucleotide
caugaggccgga

SEQ ID NO: 152371 - RNA, 11 nt, Artificial Sequence
  Description of Artificial Sequence: Synthetic oligonucleotide
acugcauuugu

SEQ ID NO: 152372 - RNA, 13 nt, Artificial Sequence
  Description of Artificial Sequence: Synthetic oligonucleotide
aauguuuacuacc

SEQ ID NO: 152373 - RNA, 15 nt, Artificial Sequence
  Description of Artificial Sequence: Synthetic oligonucleotide
aauuuuuugaugaaa

SEQ ID NO: 152374 - RNA, 14 nt, Artificial Sequence
  Description of Artificial Sequence: Synthetic oligonucleotide
cagugugugaauuu

SEQ ID NO: 152375 - RNA, 13 nt, Artificial Sequence
  Description of Artificial Sequence: Synthetic oligonucleotide
gagcaauguaugu

SEQ ID NO: 152376 - RNA, 14 nt, Artificial Sequence
  Description of Artificial Sequence: Synthetic oligonucleotide
aaagcacauauaua

SEQ ID NO: 152377 - RNA, 14 nt, Artificial Sequence
  Description of Artificial Sequence: Synthetic oligonucleotide
guaauaguuucucc

SEQ ID NO: 152378 - RNA, 13 nt, Artificial Sequence
  Description of Artificial Sequence: Synthetic oligonucleotide
aguuucuccaaau

SEQ ID NO: 152379 - RNA, 13 nt, Artificial Sequence
  Description of Artificial Sequence: Synthetic oligonucleotide
uacuuccuagaaa

SEQ ID NO: 152380 - RNA, 13 nt, Artificial Sequence
  Description of Artificial Sequence: Synthetic oligonucleotide
uacaccauauaug

SEQ ID NO: 152381 - RNA, 14 nt, Artificial Sequence
  Description of Artificial Sequence: Synthetic oligonucleotide
auauaugaauggag

SEQ ID NO: 152382 - RNA, 13 nt, Artificial Sequence
  Description of Artificial Sequence: Synthetic oligonucleotide
acgagaagaagau

SEQ ID NO: 152383 - RNA, 13 nt, Artificial Sequence
  Description of Artificial Sequence: Synthetic oligonucleotide
ucauuuacaggga

SEQ ID NO: 152384 - RNA, 13 nt, Artificial Sequence
  Description of Artificial Sequence: Synthetic oligonucleotide
cauuuacagggac

SEQ ID NO: 152385 - RNA, 10 nt, Artificial Sequence
  Description of Artificial Sequence: Synthetic oligonucleotide
agggaccuga

SEQ ID NO: 152386 - RNA, 14 nt, Artificial Sequence
  Description of Artificial Sequence: Synthetic oligonucleotide
uguuugacugcauc

SEQ ID NO: 152387 - RNA, 13 nt, Artificial Sequence
  Description of Artificial Sequence: Synthetic oligonucleotide
uuugacugcaucg

SEQ ID NO: 152388 - RNA, 12 nt, Artificial Sequence
  Description of Artificial Sequence: Synthetic oligonucleotide
gaguucacaggg

SEQ ID NO: 152389 - RNA, 13 nt, Artificial Sequence
  Description of Artificial Sequence: Synthetic oligonucleotide
ggcaccucugucc

SEQ ID NO: 152390 - RNA, 15 nt, Artificial Sequence
  Description of Artificial Sequence: Synthetic oligonucleotide
gguuugucuuuuuaa

SEQ ID NO: 152391 - RNA, 14 nt, Artificial Sequence
  Description of Artificial Sequence: Synthetic oligonucleotide
uuugucuuuuuaag

SEQ ID NO: 152392 - RNA, 13 nt, Artificial Sequence
  Description of Artificial Sequence: Synthetic oligonucleotide
ccuaaagguuguc

SEQ ID NO: 152393 - RNA, 12 nt, Artificial Sequence
  Description of Artificial Sequence: Synthetic oligonucleotide
aagguugucgac

SEQ ID NO: 152394 - RNA, 13 nt, Artificial Sequence
  Description of Artificial Sequence: Synthetic oligonucleotide
accuggcaauugu

SEQ ID NO: 152395 - RNA, 12 nt, Artificial Sequence
  Description of Artificial Sequence: Synthetic oligonucleotide
aguggugcgagg

SEQ ID NO: 152396 - RNA, 13 nt, Artificial Sequence
  Description of Artificial Sequence: Synthetic oligonucleotide
agagacaugaaau

SEQ ID NO: 152397 - RNA, 13 nt, Artificial Sequence
  Description of Artificial Sequence: Synthetic oligonucleotide
auauauuucucca

SEQ ID NO: 152398 - RNA, 10 nt, Artificial Sequence
  Description of Artificial Sequence: Synthetic oligonucleotide
caugaaggcu

SEQ ID NO: 152399 - RNA, 11 nt, Artificial Sequence
  Description of Artificial Sequence: Synthetic oligonucleotide
gcuggaguggu

SEQ ID NO: 152400 - RNA, 11 nt, Artificial Sequence
  Description of Artificial Sequence: Synthetic oligonucleotide
aggaagagagg

SEQ ID NO: 152401 - RNA, 12 nt, Artificial Sequence
  Description of Artificial Sequence: Synthetic oligonucleotide
cuugcaucgggc

SEQ ID NO: 152402 - RNA, 13 nt, Artificial Sequence
  Description of Artificial Sequence: Synthetic oligonucleotide
auauccuacugug

SEQ ID NO: 152403 - RNA, 13 nt, Artificial Sequence
  Description of Artificial Sequence: Synthetic oligonucleotide
uccuacuguguaa

SEQ ID NO: 152404 - RNA, 12 nt, Artificial Sequence
  Description of Artificial Sequence: Synthetic oligonucleotide
ccuuguagugua

SEQ ID NO: 152405 - RNA, 13 nt, Artificial Sequence
  Description of Artificial Sequence: Synthetic oligonucleotide
ucuuuguugauug

SEQ ID NO: 152406 - RNA, 14 nt, Artificial Sequence
  Description of Artificial Sequence: Synthetic oligonucleotide
uuuguugauugaaa

SEQ ID NO: 152407 - RNA, 15 nt, Artificial Sequence
  Description of Artificial Sequence: Synthetic oligonucleotide
uucuuuuucuuccau

SEQ ID NO: 152408 - RNA, 13 nt, Artificial Sequence
  Description of Artificial Sequence: Synthetic oligonucleotide
aaucuuccuucua

SEQ ID NO: 152409 - RNA, 13 nt, Artificial Sequence
  Description of Artificial Sequence: Synthetic oligonucleotide
uugaaugcuucau

SEQ ID NO: 152410 - RNA, 13 nt, Artificial Sequence
  Description of Artificial Sequence: Synthetic oligonucleotide
ugaaugcuucaug

SEQ ID NO: 152411 - RNA, 13 nt, Artificial Sequence
  Description of Artificial Sequence: Synthetic oligonucleotide
aauucuacuuuga

SEQ ID NO: 152412 - RNA, 13 nt, Artificial Sequence
  Description of Artificial Sequence: Synthetic oligonucleotide
agcaacuacagac

SEQ ID NO: 152413 - RNA, 13 nt, Artificial Sequence
  Description of Artificial Sequence: Synthetic oligonucleotide
gaccaaggucaac

SEQ ID NO: 152414 - RNA, 13 nt, Artificial Sequence
  Description of Artificial Sequence: Synthetic oligonucleotide
cgacuaucucgac

SEQ ID NO: 152415 - RNA, 13 nt, Artificial Sequence
  Description of Artificial Sequence: Synthetic oligonucleotide
aaccuucccaaac

SEQ ID NO: 152416 - RNA, 14 nt, Artificial Sequence
  Description of Artificial Sequence: Synthetic oligonucleotide
ccaagcuuagaacu

SEQ ID NO: 152417 - RNA, 15 nt, Artificial Sequence
  Description of Artificial Sequence: Synthetic oligonucleotide
agcuuagaacuuuaa

SEQ ID NO: 152418 - RNA, 11 nt, Artificial Sequence
  Description of Artificial Sequence: Synthetic oligonucleotide
aagaccaccac

SEQ ID NO: 152419 - RNA, 14 nt, Artificial Sequence
  Description of Artificial Sequence: Synthetic oligonucleotide
gcgagaaauaaagu

SEQ ID NO: 152420 - RNA, 14 nt, Artificial Sequence
  Description of Artificial Sequence: Synthetic oligonucleotide
cgagaaauaaaguu

SEQ ID NO: 152421 - RNA, 12 nt, Artificial Sequence
  Description of Artificial Sequence: Synthetic oligonucleotide
aggaaaugaucc

SEQ ID NO: 152422 - RNA, 13 nt, Artificial Sequence
  Description of Artificial Sequence: Synthetic oligonucleotide
gaagaaaugaaac

SEQ ID NO: 152423 - RNA, 13 nt, Artificial Sequence
  Description of Artificial Sequence: Synthetic oligonucleotide
guuuccauccucc

SEQ ID NO: 152424 - RNA, 15 nt, Artificial Sequence
  Description of Artificial Sequence: Synthetic oligonucleotide
acugaaaaucuuuga

SEQ ID NO: 152425 - RNA, 11 nt, Artificial Sequence
  Description of Artificial Sequence: Synthetic oligonucleotide
ugccguucagg

SEQ ID NO: 152426 - RNA, 13 nt, Artificial Sequence
  Description of Artificial Sequence: Synthetic oligonucleotide
caggguccagaag

SEQ ID NO: 152427 - RNA, 13 nt, Artificial Sequence
  Description of Artificial Sequence: Synthetic oligonucleotide
ucaagacugcuug

SEQ ID NO: 152428 - RNA, 13 nt, Artificial Sequence
  Description of Artificial Sequence: Synthetic oligonucleotide
uccaugucuuugg

SEQ ID NO: 152429 - RNA, 11 nt, Artificial Sequence
  Description of Artificial Sequence: Synthetic oligonucleotide
gccugaaacac

SEQ ID NO: 152430 - RNA, 12 nt, Artificial Sequence
  Description of Artificial Sequence: Synthetic oligonucleotide
ucucuguaccuc

SEQ ID NO: 152431 - RNA, 12 nt, Artificial Sequence
  Description of Artificial Sequence: Synthetic oligonucleotide
agcaagacaaga

SEQ ID NO: 152432 - RNA, 13 nt, Artificial Sequence
  Description of Artificial Sequence: Synthetic oligonucleotide
gcaagacaagaaa

SEQ ID NO: 152433 - RNA, 12 nt, Artificial Sequence
  Description of Artificial Sequence: Synthetic oligonucleotide
uguacaagaucc

SEQ ID NO: 152434 - RNA, 12 nt, Artificial Sequence
  Description of Artificial Sequence: Synthetic oligonucleotide
cguacuugcaga

SEQ ID NO: 152435 - RNA, 13 nt, Artificial Sequence
  Description of Artificial Sequence: Synthetic oligonucleotide
cgaucgauacaga

SEQ ID NO: 152436 - RNA, 13 nt, Artificial Sequence
  Description of Artificial Sequence: Synthetic oligonucleotide
uauaaaaauaaau

SEQ ID NO: 152437 - RNA, 13 nt, Artificial Sequence
  Description of Artificial Sequence: Synthetic oligonucleotide
uaaaaauaaauau

SEQ ID NO: 152438 - RNA, 13 nt, Artificial Sequence
  Description of Artificial Sequence: Synthetic oligonucleotide
uuugacugcugug

SEQ ID NO: 152439 - RNA, 13 nt, Artificial Sequence
  Description of Artificial Sequence: Synthetic oligonucleotide
ggagaugagagac

SEQ ID NO: 152440 - RNA, 10 nt, Artificial Sequence
  Description of Artificial Sequence: Synthetic oligonucleotide
ucccacuugg

SEQ ID NO: 152441 - RNA, 10 nt, Artificial Sequence
  Description of Artificial Sequence: Synthetic oligonucleotide
guucacggcc

SEQ ID NO: 152442 - RNA, 12 nt, Artificial Sequence
  Description of Artificial Sequence: Synthetic oligonucleotide
accaucacacca

SEQ ID NO: 152443 - RNA, 10 nt, Artificial Sequence
  Description of Artificial Sequence: Synthetic oligonucleotide
cugcggguuu

SEQ ID NO: 152444 - RNA, 9 nt, Artificial Sequence
  Description of Artificial Sequence: Synthetic oligonucleotide
uccaguuug

SEQ ID NO: 152445 - RNA, 12 nt, Artificial Sequence
  Description of Artificial Sequence: Synthetic oligonucleotide
uuaaggacuucu

SEQ ID NO: 152446 - RNA, 12 nt, Artificial Sequence
  Description of Artificial Sequence: Synthetic oligonucleotide
agugggacagag

SEQ ID NO: 152447 - RNA, 13 nt, Artificial Sequence
  Description of Artificial Sequence: Synthetic oligonucleotide
auuuguuauugug

SEQ ID NO: 152448 - RNA, 12 nt, Artificial Sequence
  Description of Artificial Sequence: Synthetic oligonucleotide
ucaaaugcauuu

SEQ ID NO: 152449 - RNA, 9 nt, Artificial Sequence
  Description of Artificial Sequence: Synthetic oligonucleotide
aggaaagcc

SEQ ID NO: 152450 - RNA, 10 nt, Artificial Sequence
  Description of Artificial Sequence: Synthetic oligonucleotide
ggaaagcccu

SEQ ID NO: 152451 - RNA, 11 nt, Artificial Sequence
  Description of Artificial Sequence: Synthetic oligonucleotide
ccagcauggcc

SEQ ID NO: 152452 - RNA, 10 nt, Artificial Sequence
  Description of Artificial Sequence: Synthetic oligonucleotide
uucucccuga

SEQ ID NO: 152453 - RNA, 11 nt, Artificial Sequence
  Description of Artificial Sequence: Synthetic oligonucleotide
aagaagcccuu

SEQ ID NO: 152454 - RNA, 11 nt, Artificial Sequence
  Description of Artificial Sequence: Synthetic oligonucleotide
gaagcccuuca

SEQ ID NO: 152455 - RNA, 10 nt, Artificial Sequence
  Description of Artificial Sequence: Synthetic oligonucleotide
cccuucagcg

SEQ ID NO: 152456 - RNA, 10 nt, Artificial Sequence
  Description of Artificial Sequence: Synthetic oligonucleotide
cuucagcggc

SEQ ID NO: 152457 - RNA, 11 nt, Artificial Sequence
  Description of Artificial Sequence: Synthetic oligonucleotide
cagcggccagu

SEQ ID NO: 152458 - RNA, 11 nt, Artificial Sequence
  Description of Artificial Sequence: Synthetic oligonucleotide
gaaaagcuccg

SEQ ID NO: 152459 - RNA, 10 nt, Artificial Sequence
  Description of Artificial Sequence: Synthetic oligonucleotide
aaagcuccgg

SEQ ID NO: 152460 - RNA, 12 nt, Artificial Sequence
  Description of Artificial Sequence: Synthetic oligonucleotide
gucaacagucug

SEQ ID NO: 152461 - RNA, 12 nt, Artificial Sequence
  Description of Artificial Sequence: Synthetic oligonucleotide
agaguucaaaag

SEQ ID NO: 152462 - RNA, 12 nt, Artificial Sequence
  Description of Artificial Sequence: Synthetic oligonucleotide
gaguucaaaagc

SEQ ID NO: 152463 - RNA, 11 nt, Artificial Sequence
  Description of Artificial Sequence: Synthetic oligonucleotide
ucaaaagcccu

SEQ ID NO: 152464 - RNA, 11 nt, Artificial Sequence
  Description of Artificial Sequence: Synthetic oligonucleotide
caaaagcccuu

SEQ ID NO: 152465 - RNA, 11 nt, Artificial Sequence
  Description of Artificial Sequence: Synthetic oligonucleotide
aaagcccuuca

SEQ ID NO: 152466 - RNA, 11 nt, Artificial Sequence
  Description of Artificial Sequence: Synthetic oligonucleotide
aagcccuucag

SEQ ID NO: 152467 - RNA, 12 nt, Artificial Sequence
  Description of Artificial Sequence: Synthetic oligonucleotide
ugaagccgcucg

SEQ ID NO: 152468 - RNA, 11 nt, Artificial Sequence
  Description of Artificial Sequence: Synthetic oligonucleotide
acgccagucaa

SEQ ID NO: 152469 - RNA, 12 nt, Artificial Sequence
  Description of Artificial Sequence: Synthetic oligonucleotide
ucuuggugcgug

SEQ ID NO: 152470 - RNA, 13 nt, Artificial Sequence
  Description of Artificial Sequence: Synthetic oligonucleotide
uuggauucaucag

SEQ ID NO: 152471 - RNA, 12 nt, Artificial Sequence
  Description of Artificial Sequence: Synthetic oligonucleotide
ggaauaccuaag

SEQ ID NO: 152472 - RNA, 11 nt, Artificial Sequence
  Description of Artificial Sequence: Synthetic oligonucleotide
uuugaggcuca

SEQ ID NO: 152473 - RNA, 10 nt, Artificial Sequence
  Description of Artificial Sequence: Synthetic oligonucleotide
cuacaauugg

SEQ ID NO: 152474 - RNA, 11 nt, Artificial Sequence
  Description of Artificial Sequence: Synthetic oligonucleotide
aguuaggagcc

SEQ ID NO: 152475 - RNA, 12 nt, Artificial Sequence
  Description of Artificial Sequence: Synthetic oligonucleotide
gucaauauccac

SEQ ID NO: 152476 - RNA, 12 nt, Artificial Sequence
  Description of Artificial Sequence: Synthetic oligonucleotide
uguucagucaca

SEQ ID NO: 152477 - RNA, 11 nt, Artificial Sequence
  Description of Artificial Sequence: Synthetic oligonucleotide
cacacacauac

SEQ ID NO: 152478 - RNA, 11 nt, Artificial Sequence
  Description of Artificial Sequence: Synthetic oligonucleotide
uccuuuugcuu

SEQ ID NO: 152479 - RNA, 15 nt, Artificial Sequence
  Description of Artificial Sequence: Synthetic oligonucleotide
uuuaaaguaauuuuu

SEQ ID NO: 152480 - RNA, 12 nt, Artificial Sequence
  Description of Artificial Sequence: Synthetic oligonucleotide
aacagucaaugg

SEQ ID NO: 152481 - RNA, 12 nt, Artificial Sequence
  Description of Artificial Sequence: Synthetic oligonucleotide
cgacaaaccaau

SEQ ID NO: 152482 - RNA, 11 nt, Artificial Sequence
  Description of Artificial Sequence: Synthetic oligonucleotide
cugcuaccacu

SEQ ID NO: 152483 - RNA, 12 nt, Artificial Sequence
  Description of Artificial Sequence: Synthetic oligonucleotide
caagcggucuua

SEQ ID NO: 152484 - RNA, 12 nt, Artificial Sequence
  Description of Artificial Sequence: Synthetic oligonucleotide
gucuuaccggcu

SEQ ID NO: 152485 - RNA, 10 nt, Artificial Sequence
  Description of Artificial Sequence: Synthetic oligonucleotide
auggguuacc

SEQ ID NO: 152486 - RNA, 10 nt, Artificial Sequence
  Description of Artificial Sequence: Synthetic oligonucleotide
uuaccugcga

SEQ ID NO: 152487 - RNA, 11 nt, Artificial Sequence
  Description of Artificial Sequence: Synthetic oligonucleotide
aucuugcugag

SEQ ID NO: 152488 - RNA, 12 nt, Artificial Sequence
  Description of Artificial Sequence: Synthetic oligonucleotide
gcauaaaacagu

SEQ ID NO: 152489 - RNA, 11 nt, Artificial Sequence
  Description of Artificial Sequence: Synthetic oligonucleotide
uccuuuauccu

SEQ ID NO: 152490 - RNA, 11 nt, Artificial Sequence
  Description of Artificial Sequence: Synthetic oligonucleotide
aacgcaaguug

SEQ ID NO: 152491 - RNA, 12 nt, Artificial Sequence
  Description of Artificial Sequence: Synthetic oligonucleotide
aacugaaaccau

SEQ ID NO: 152492 - RNA, 13 nt, Artificial Sequence
  Description of Artificial Sequence: Synthetic oligonucleotide
cuuuguuaaauau

SEQ ID NO: 152493 - RNA, 13 nt, Artificial Sequence
  Description of Artificial Sequence: Synthetic oligonucleotide
uauauuaaaaguu

SEQ ID NO: 152494 - RNA, 12 nt, Artificial Sequence
  Description of Artificial Sequence: Synthetic oligonucleotide
uuuugacuuaac

SEQ ID NO: 152495 - RNA, 12 nt, Artificial Sequence
  Description of Artificial Sequence: Synthetic oligonucleotide
caaacucagcac

SEQ ID NO: 152496 - RNA, 10 nt, Artificial Sequence
  Description of Artificial Sequence: Synthetic oligonucleotide
gcugaccuca

SEQ ID NO: 152497 - RNA, 13 nt, Artificial Sequence
  Description of Artificial Sequence: Synthetic oligonucleotide
uuauucagaucgc

SEQ ID NO: 152498 - RNA, 12 nt, Artificial Sequence
  Description of Artificial Sequence: Synthetic oligonucleotide
ggguucugggau

SEQ ID NO: 152499 - RNA, 14 nt, Artificial Sequence
  Description of Artificial Sequence: Synthetic oligonucleotide
uauuggaaauuaug

SEQ ID NO: 152500 - RNA, 12 nt, Artificial Sequence
  Description of Artificial Sequence: Synthetic oligonucleotide
uggaagcacuag

SEQ ID NO: 152501 - RNA, 12 nt, Artificial Sequence
  Description of Artificial Sequence: Synthetic oligonucleotide
uuuuuaugugga

SEQ ID NO: 152502 - RNA, 11 nt, Artificial Sequence
  Description of Artificial Sequence: Synthetic oligonucleotide
gaauugguaga

SEQ ID NO: 152503 - RNA, 12 nt, Artificial Sequence
  Description of Artificial Sequence: Synthetic oligonucleotide
uagacuuggaga

SEQ ID NO: 152504 - RNA, 12 nt, Artificial Sequence
  Description of Artificial Sequence: Synthetic oligonucleotide
uacaguauucca

SEQ ID NO: 152505 - RNA, 14 nt, Artificial Sequence
  Description of Artificial Sequence: Synthetic oligonucleotide
cacugaugaauuaa

SEQ ID NO: 152506 - RNA, 11 nt, Artificial Sequence
  Description of Artificial Sequence: Synthetic oligonucleotide
cacaucaucac

SEQ ID NO: 152507 - RNA, 12 nt, Artificial Sequence
  Description of Artificial Sequence: Synthetic oligonucleotide
ucaccaaacaga

SEQ ID NO: 152508 - RNA, 11 nt, Artificial Sequence
  Description of Artificial Sequence: Synthetic oligonucleotide
gaacaugaugg

SEQ ID NO: 152509 - RNA, 11 nt, Artificial Sequence
  Description of Artificial Sequence: Synthetic oligonucleotide
auguagacugc

SEQ ID NO: 152510 - RNA, 12 nt, Artificial Sequence
  Description of Artificial Sequence: Synthetic oligonucleotide
gaucuauuuaug

SEQ ID NO: 152511 - RNA, 11 nt, Artificial Sequence
  Description of Artificial Sequence: Synthetic oligonucleotide
cacuauuauca

SEQ ID NO: 152512 - RNA, 10 nt, Artificial Sequence
  Description of Artificial Sequence: Synthetic oligonucleotide
ucaguucugc

SEQ ID NO: 152513 - RNA, 12 nt, Artificial Sequence
  Description of Artificial Sequence: Synthetic oligonucleotide
gauuaaaccuac

SEQ ID NO: 152514 - RNA, 12 nt, Artificial Sequence
  Description of Artificial Sequence: Synthetic oligonucleotide
uaaaauccuucu

SEQ ID NO: 152515 - RNA, 11 nt, Artificial Sequence
  Description of Artificial Sequence: Synthetic oligonucleotide
augcuguagac

SEQ ID NO: 152516 - RNA, 12 nt, Artificial Sequence
  Description of Artificial Sequence: Synthetic oligonucleotide
ugauaggaauag

SEQ ID NO: 152517 - RNA, 10 nt, Artificial Sequence
  Description of Artificial Sequence: Synthetic oligonucleotide
auggcccuga

SEQ ID NO: 152518 - RNA, 10 nt, Artificial Sequence
  Description of Artificial Sequence: Synthetic oligonucleotide
uccucaagca

SEQ ID NO: 152519 - RNA, 9 nt, Artificial Sequence
  Description of Artificial Sequence: Synthetic oligonucleotide
uucagccca

SEQ ID NO: 152520 - RNA, 10 nt, Artificial Sequence
  Description of Artificial Sequence: Synthetic oligonucleotide
cugcugaacc

SEQ ID NO: 152521 - RNA, 11 nt, Artificial Sequence
  Description of Artificial Sequence: Synthetic oligonucleotide
aguucucuuca

SEQ ID NO: 152522 - RNA, 10 nt, Artificial Sequence
  Description of Artificial Sequence: Synthetic oligonucleotide
cagccuagag

SEQ ID NO: 152523 - RNA, 12 nt, Artificial Sequence
  Description of Artificial Sequence: Synthetic oligonucleotide
ucugugaagugu

SEQ ID NO: 152524 - RNA, 13 nt, Artificial Sequence
  Description of Artificial Sequence: Synthetic oligonucleotide
gagaaaauuucaa

SEQ ID NO: 152525 - RNA, 10 nt, Artificial Sequence
  Description of Artificial Sequence: Synthetic oligonucleotide
auccuccuga

SEQ ID NO: 152526 - RNA, 11 nt, Artificial Sequence
  Description of Artificial Sequence: Synthetic oligonucleotide
ugacaucauau

SEQ ID NO: 152527 - RNA, 12 nt, Artificial Sequence
  Description of Artificial Sequence: Synthetic oligonucleotide
aucuucaucaua

SEQ ID NO: 152528 - RNA, 12 nt, Artificial Sequence
  Description of Artificial Sequence: Synthetic oligonucleotide
acuagcuauuaa

SEQ ID NO: 152529 - RNA, 13 nt, Artificial Sequence
  Description of Artificial Sequence: Synthetic oligonucleotide
cucuacuaaaaau

SEQ ID NO: 152530 - RNA, 11 nt, Artificial Sequence
  Description of Artificial Sequence: Synthetic oligonucleotide
cuaucucgccu

SEQ ID NO: 152531 - RNA, 12 nt, Artificial Sequence
  Description of Artificial Sequence: Synthetic oligonucleotide
uucgguccaguu

SEQ ID NO: 152532 - RNA, 10 nt, Artificial Sequence
  Description of Artificial Sequence: Synthetic oligonucleotide
auguagccgc

SEQ ID NO: 152533 - RNA, 11 nt, Artificial Sequence
  Description of Artificial Sequence: Synthetic oligonucleotide
gaggagacuug

SEQ ID NO: 152534 - RNA, 11 nt, Artificial Sequence
  Description of Artificial Sequence: Synthetic oligonucleotide
aguagugagga

SEQ ID NO: 152535 - RNA, 13 nt, Artificial Sequence
  Description of Artificial Sequence: Synthetic oligonucleotide
agaugaguacaaa

SEQ ID NO: 152536 - RNA, 12 nt, Artificial Sequence
  Description of Artificial Sequence: Synthetic oligonucleotide
uuguuaaugggc

SEQ ID NO: 152537 - RNA, 12 nt, Artificial Sequence
  Description of Artificial Sequence: Synthetic oligonucleotide
uuuuaauuuauu

SEQ ID NO: 152538 - RNA, 11 nt, Artificial Sequence
  Description of Artificial Sequence: Synthetic oligonucleotide
auuuaaauaug

SEQ ID NO: 152539 - RNA, 12 nt, Artificial Sequence
  Description of Artificial Sequence: Synthetic oligonucleotide
auccuuuguuuc

SEQ ID NO: 152540 - RNA, 13 nt, Artificial Sequence
  Description of Artificial Sequence: Synthetic oligonucleotide
gucuaaguguuug

SEQ ID NO: 152541 - RNA, 11 nt, Artificial Sequence
  Description of Artificial Sequence: Synthetic oligonucleotide
ccugugacaaa

SEQ ID NO: 152542 - RNA, 12 nt, Artificial Sequence
  Description of Artificial Sequence: Synthetic oligonucleotide
caggcugaauua

SEQ ID NO: 152543 - RNA, 13 nt, Artificial Sequence
  Description of Artificial Sequence: Synthetic oligonucleotide
ucauucuuacaau

SEQ ID NO: 152544 - RNA, 14 nt, Artificial Sequence
  Description of Artificial Sequence: Synthetic oligonucleotide
cauucuuacaauug

SEQ ID NO: 152545 - RNA, 11 nt, Artificial Sequence
  Description of Artificial Sequence: Synthetic oligonucleotide
agagaguguac

SEQ ID NO: 152546 - RNA, 11 nt, Artificial Sequence
  Description of Artificial Sequence: Synthetic oligonucleotide
gaacucagcag

SEQ ID NO: 152547 - RNA, 12 nt, Artificial Sequence
  Description of Artificial Sequence: Synthetic oligonucleotide
uuauuuucagua

SEQ ID NO: 152548 - RNA, 11 nt, Artificial Sequence
  Description of Artificial Sequence: Synthetic oligonucleotide
cuuaaauggaa

SEQ ID NO: 152549 - RNA, 12 nt, Artificial Sequence
  Description of Artificial Sequence: Synthetic oligonucleotide
gccuaaaauugu

SEQ ID NO: 152550 - RNA, 12 nt, Artificial Sequence
  Description of Artificial Sequence: Synthetic oligonucleotide
acuaacaucugg

SEQ ID NO: 152551 - RNA, 11 nt, Artificial Sequence
  Description of Artificial Sequence: Synthetic oligonucleotide
gacugugagcu

SEQ ID NO: 152552 - RNA, 13 nt, Artificial Sequence
  Description of Artificial Sequence: Synthetic oligonucleotide
gcuuuuuauuaau

SEQ ID NO: 152553 - RNA, 12 nt, Artificial Sequence
  Description of Artificial Sequence: Synthetic oligonucleotide
ucuucuuacauu

SEQ ID NO: 152554 - RNA, 14 nt, Artificial Sequence
  Description of Artificial Sequence: Synthetic oligonucleotide
auuuguaaaaaugu

SEQ ID NO: 152555 - RNA, 14 nt, Artificial Sequence
  Description of Artificial Sequence: Synthetic oligonucleotide
ucuuaauucauauu

SEQ ID NO: 152556 - RNA, 12 nt, Artificial Sequence
  Description of Artificial Sequence: Synthetic oligonucleotide
aacuaaucauga

SEQ ID NO: 152557 - RNA, 11 nt, Artificial Sequence
  Description of Artificial Sequence: Synthetic oligonucleotide
cugcucuuggg

SEQ ID NO: 152558 - RNA, 12 nt, Artificial Sequence
  Description of Artificial Sequence: Synthetic oligonucleotide
aguagcuuugag

SEQ ID NO: 152559 - RNA, 13 nt, Artificial Sequence
  Description of Artificial Sequence: Synthetic oligonucleotide
acguaauauuuca

SEQ ID NO: 152560 - RNA, 12 nt, Artificial Sequence
  Description of Artificial Sequence: Synthetic oligonucleotide
auucucuucacu

SEQ ID NO: 152561 - RNA, 13 nt, Artificial Sequence
  Description of Artificial Sequence: Synthetic oligonucleotide
uaaugcuaagaaa

SEQ ID NO: 152562 - RNA, 11 nt, Artificial Sequence
  Description of Artificial Sequence: Synthetic oligonucleotide
cugaaaaucaa

SEQ ID NO: 152563 - RNA, 13 nt, Artificial Sequence
  Description of Artificial Sequence: Synthetic oligonucleotide
auaugauuacuuu

SEQ ID NO: 152564 - RNA, 13 nt, Artificial Sequence
  Description of Artificial Sequence: Synthetic oligonucleotide
auuuuguucuaca

SEQ ID NO: 152565 - RNA, 11 nt, Artificial Sequence
  Description of Artificial Sequence: Synthetic oligonucleotide
ccgggacucuc

SEQ ID NO: 152566 - RNA, 13 nt, Artificial Sequence
  Description of Artificial Sequence: Synthetic oligonucleotide
cuuuaaaguaaag

SEQ ID NO: 152567 - RNA, 12 nt, Artificial Sequence
  Description of Artificial Sequence: Synthetic oligonucleotide
cuggaagccugg

SEQ ID NO: 152568 - RNA, 13 nt, Artificial Sequence
  Description of Artificial Sequence: Synthetic oligonucleotide
aaacaaaagagag

SEQ ID NO: 152569 - RNA, 12 nt, Artificial Sequence
  Description of Artificial Sequence: Synthetic oligonucleotide
ucaguuaugccg

SEQ ID NO: 152570 - RNA, 12 nt, Artificial Sequence
  Description of Artificial Sequence: Synthetic oligonucleotide
aaaagaagucca

SEQ ID NO: 152571 - RNA, 10 nt, Artificial Sequence
  Description of Artificial Sequence: Synthetic oligonucleotide
ggugagguua

SEQ ID NO: 152572 - RNA, 10 nt, Artificial Sequence
  Description of Artificial Sequence: Synthetic oligonucleotide
ggaagaggac

SEQ ID NO: 152573 - RNA, 12 nt, Artificial Sequence
  Description of Artificial Sequence: Synthetic oligonucleotide
agcaaguauugu

SEQ ID NO: 152574 - RNA, 11 nt, Artificial Sequence
  Description of Artificial Sequence: Synthetic oligonucleotide
uuguagcacuc

SEQ ID NO: 152575 - RNA, 13 nt, Artificial Sequence
  Description of Artificial Sequence: Synthetic oligonucleotide
caaaaccacaaau

SEQ ID NO: 152576 - RNA, 11 nt, Artificial Sequence
  Description of Artificial Sequence: Synthetic oligonucleotide
aagcccauaca

SEQ ID NO: 152577 - RNA, 10 nt, Artificial Sequence
  Description of Artificial Sequence: Synthetic oligonucleotide
gcccauacag

SEQ ID NO: 152578 - RNA, 11 nt, Artificial Sequence
  Description of Artificial Sequence: Synthetic oligonucleotide
agaaaccuucc

SEQ ID NO: 152579 - RNA, 9 nt, Artificial Sequence
  Description of Artificial Sequence: Synthetic oligonucleotide
uauaccuac

SEQ ID NO: 152580 - RNA, 12 nt, Artificial Sequence
  Description of Artificial Sequence: Synthetic oligonucleotide
ccaguuuucgga

SEQ ID NO: 152581 - RNA, 8 nt, Artificial Sequence
  Description of Artificial Sequence: Synthetic oligonucleotide
gaacaggg

SEQ ID NO: 152582 - RNA, 12 nt, Artificial Sequence
  Description of Artificial Sequence: Synthetic oligonucleotide
uaacuuuccagu

SEQ ID NO: 152583 - RNA, 13 nt, Artificial Sequence
  Description of Artificial Sequence: Synthetic oligonucleotide
aaguuugguuuug

SEQ ID NO: 152584 - RNA, 11 nt, Artificial Sequence
  Description of Artificial Sequence: Synthetic oligonucleotide
uucccacugua

SEQ ID NO: 152585 - RNA, 12 nt, Artificial Sequence
  Description of Artificial Sequence: Synthetic oligonucleotide
gauaccauauga

SEQ ID NO: 152586 - RNA, 10 nt, Artificial Sequence
  Description of Artificial Sequence: Synthetic oligonucleotide
acaugggcug

SEQ ID NO: 152587 - RNA, 12 nt, Artificial Sequence
  Description of Artificial Sequence: Synthetic oligonucleotide
aacuuuuucaua

SEQ ID NO: 152588 - RNA, 11 nt, Artificial Sequence
  Description of Artificial Sequence: Synthetic oligonucleotide
augaggccgga

SEQ ID NO: 152589 - RNA, 10 nt, Artificial Sequence
  Description of Artificial Sequence: Synthetic oligonucleotide
cugcauuugu

SEQ ID NO: 152590 - RNA, 12 nt, Artificial Sequence
  Description of Artificial Sequence: Synthetic oligonucleotide
auguuuacuacc

SEQ ID NO: 152591 - RNA, 14 nt, Artificial Sequence
  Description of Artificial Sequence: Synthetic oligonucleotide
auuuuuugaugaaa

SEQ ID NO: 152592 - RNA, 13 nt, Artificial Sequence
  Description of Artificial Sequence: Synthetic oligonucleotide
agugugugaauuu

SEQ ID NO: 152593 - RNA, 12 nt, Artificial Sequence
  Description of Artificial Sequence: Synthetic oligonucleotide
agcaauguaugu

SEQ ID NO: 152594 - RNA, 13 nt, Artificial Sequence
  Description of Artificial Sequence: Synthetic oligonucleotide
aagcacauauaua

SEQ ID NO: 152595 - RNA, 13 nt, Artificial Sequence
  Description of Artificial Sequence: Synthetic oligonucleotide
uaauaguuucucc

SEQ ID NO: 152596 - RNA, 12 nt, Artificial Sequence
  Description of Artificial Sequence: Synthetic oligonucleotide
guuucuccaaau

SEQ ID NO: 152597 - RNA, 12 nt, Artificial Sequence
  Description of Artificial Sequence: Synthetic oligonucleotide
acuuccuagaaa

SEQ ID NO: 152598 - RNA, 12 nt, Artificial Sequence
  Description of Artificial Sequence: Synthetic oligonucleotide
acaccauauaug

SEQ ID NO: 152599 - RNA, 13 nt, Artificial Sequence
  Description of Artificial Sequence: Synthetic oligonucleotide
uauaugaauggag

SEQ ID NO: 152600 - RNA, 12 nt, Artificial Sequence
  Description of Artificial Sequence: Synthetic oligonucleotide
cauuuacaggga

SEQ ID NO: 152601 - RNA, 12 nt, Artificial Sequence
  Description of Artificial Sequence: Synthetic oligonucleotide
auuuacagggac

SEQ ID NO: 152602 - RNA, 9 nt, Artificial Sequence
  Description of Artificial Sequence: Synthetic oligonucleotide
gggaccuga

SEQ ID NO: 152603 - RNA, 13 nt, Artificial Sequence
  Description of Artificial Sequence: Synthetic oligonucleotide
guuugacugcauc

SEQ ID NO: 152604 - RNA, 12 nt, Artificial Sequence
  Description of Artificial Sequence: Synthetic oligonucleotide
uugacugcaucg

SEQ ID NO: 152605 - RNA, 11 nt, Artificial Sequence
  Description of Artificial Sequence: Synthetic oligonucleotide
aguucacaggg

SEQ ID NO: 152606 - RNA, 12 nt, Artificial Sequence
  Description of Artificial Sequence: Synthetic oligonucleotide
gcaccucugucc

SEQ ID NO: 152607 - RNA, 14 nt, Artificial Sequence
  Description of Artificial Sequence: Synthetic oligonucleotide
guuugucuuuuuaa

SEQ ID NO: 152608 - RNA, 13 nt, Artificial Sequence
  Description of Artificial Sequence: Synthetic oligonucleotide
uugucuuuuuaag

SEQ ID NO: 152609 - RNA, 12 nt, Artificial Sequence
  Description of Artificial Sequence: Synthetic oligonucleotide
cuaaagguuguc

SEQ ID NO: 152610 - RNA, 11 nt, Artificial Sequence
  Description of Artificial Sequence: Synthetic oligonucleotide
agguugucgac

SEQ ID NO: 152611 - RNA, 12 nt, Artificial Sequence
  Description of Artificial Sequence: Synthetic oligonucleotide
ccuggcaauugu

SEQ ID NO: 152612 - RNA, 11 nt, Artificial Sequence
  Description of Artificial Sequence: Synthetic oligonucleotide
guggugcgagg

SEQ ID NO: 152613 - RNA, 12 nt, Artificial Sequence
  Description of Artificial Sequence: Synthetic oligonucleotide
gagacaugaaau

SEQ ID NO: 152614 - RNA, 12 nt, Artificial Sequence
  Description of Artificial Sequence: Synthetic oligonucleotide
uauauuucucca

SEQ ID NO: 152615 - RNA, 9 nt, Artificial Sequence
  Description of Artificial Sequence: Synthetic oligonucleotide
augaaggcu

SEQ ID NO: 152616 - RNA, 10 nt, Artificial Sequence
  Description of Artificial Sequence: Synthetic oligonucleotide
cuggaguggu

SEQ ID NO: 152617 - RNA, 10 nt, Artificial Sequence
  Description of Artificial Sequence: Synthetic oligonucleotide
ggaagagagg

SEQ ID NO: 152618 - RNA, 11 nt, Artificial Sequence
  Description of Artificial Sequence: Synthetic oligonucleotide
uugcaucgggc

SEQ ID NO: 152619 - RNA, 12 nt, Artificial Sequence
  Description of Artificial Sequence: Synthetic oligonucleotide
uauccuacugug

SEQ ID NO: 152620 - RNA, 12 nt, Artificial Sequence
  Description of Artificial Sequence: Synthetic oligonucleotide
ccuacuguguaa

SEQ ID NO: 152621 - RNA, 11 nt, Artificial Sequence
  Description of Artificial Sequence: Synthetic oligonucleotide
cuuguagugua

SEQ ID NO: 152622 - RNA, 12 nt, Artificial Sequence
  Description of Artificial Sequence: Synthetic oligonucleotide
cuuuguugauug

SEQ ID NO: 152623 - RNA, 13 nt, Artificial Sequence
  Description of Artificial Sequence: Synthetic oligonucleotide
uuguugauugaaa

SEQ ID NO: 152624 - RNA, 14 nt, Artificial Sequence
  Description of Artificial Sequence: Synthetic oligonucleotide
ucuuuuucuuccau

SEQ ID NO: 152625 - RNA, 12 nt, Artificial Sequence
  Description of Artificial Sequence: Synthetic oligonucleotide
aucuuccuucua

SEQ ID NO: 152626 - RNA, 12 nt, Artificial Sequence
  Description of Artificial Sequence: Synthetic oligonucleotide
ugaaugcuucau

SEQ ID NO: 152627 - RNA, 12 nt, Artificial Sequence
  Description of Artificial Sequence: Synthetic oligonucleotide
gaaugcuucaug

SEQ ID NO: 152628 - RNA, 12 nt, Artificial Sequence
  Description of Artificial Sequence: Synthetic oligonucleotide
auucuacuuuga

SEQ ID NO: 152629 - RNA, 12 nt, Artificial Sequence
  Description of Artificial Sequence: Synthetic oligonucleotide
gcaacuacagac

SEQ ID NO: 152630 - RNA, 12 nt, Artificial Sequence
  Description of Artificial Sequence: Synthetic oligonucleotide
accaaggucaac

SEQ ID NO: 152631 - RNA, 12 nt, Artificial Sequence
  Description of Artificial Sequence: Synthetic oligonucleotide
gacuaucucgac

SEQ ID NO: 152632 - RNA, 12 nt, Artificial Sequence
  Description of Artificial Sequence: Synthetic oligonucleotide
accuucccaaac

SEQ ID NO: 152633 - RNA, 13 nt, Artificial Sequence
  Description of Artificial Sequence: Synthetic oligonucleotide
caagcuuagaacu

SEQ ID NO: 152634 - RNA, 14 nt, Artificial Sequence
  Description of Artificial Sequence: Synthetic oligonucleotide
gcuuagaacuuuaa

SEQ ID NO: 152635 - RNA, 13 nt, Artificial Sequence
  Description of Artificial Sequence: Synthetic oligonucleotide
aacuuuaagcaac

SEQ ID NO: 152636 - RNA, 10 nt, Artificial Sequence
  Description of Artificial Sequence: Synthetic oligonucleotide
agaccaccac

SEQ ID NO: 152637 - RNA, 13 nt, Artificial Sequence
  Description of Artificial Sequence: Synthetic oligonucleotide
cgagaaauaaagu

SEQ ID NO: 152638 - RNA, 13 nt, Artificial Sequence
  Description of Artificial Sequence: Synthetic oligonucleotide
gagaaauaaaguu

SEQ ID NO: 152639 - RNA, 11 nt, Artificial Sequence
  Description of Artificial Sequence: Synthetic oligonucleotide
ggaaaugaucc

SEQ ID NO: 152640 - RNA, 12 nt, Artificial Sequence
  Description of Artificial Sequence: Synthetic oligonucleotide
aagaaaugaaac

SEQ ID NO: 152641 - RNA, 12 nt, Artificial Sequence
  Description of Artificial Sequence: Synthetic oligonucleotide
uuuccauccucc

SEQ ID NO: 152642 - RNA, 14 nt, Artificial Sequence
  Description of Artificial Sequence: Synthetic oligonucleotide
cugaaaaucuuuga

SEQ ID NO: 152643 - RNA, 10 nt, Artificial Sequence
  Description of Artificial Sequence: Synthetic oligonucleotide
gccguucagg

SEQ ID NO: 152644 - RNA, 12 nt, Artificial Sequence
  Description of Artificial Sequence: Synthetic oligonucleotide
aggguccagaag

SEQ ID NO: 152645 - RNA, 12 nt, Artificial Sequence
  Description of Artificial Sequence: Synthetic oligonucleotide
caagacugcuug

SEQ ID NO: 152646 - RNA, 12 nt, Artificial Sequence
  Description of Artificial Sequence: Synthetic oligonucleotide
ccaugucuuugg

SEQ ID NO: 152647 - RNA, 10 nt, Artificial Sequence
  Description of Artificial Sequence: Synthetic oligonucleotide
ccugaaacac

SEQ ID NO: 152648 - RNA, 11 nt, Artificial Sequence
  Description of Artificial Sequence: Synthetic oligonucleotide
cucuguaccuc

SEQ ID NO: 152649 - RNA, 11 nt, Artificial Sequence
  Description of Artificial Sequence: Synthetic oligonucleotide
gcaagacaaga

SEQ ID NO: 152650 - RNA, 12 nt, Artificial Sequence
  Description of Artificial Sequence: Synthetic oligonucleotide
caagacaagaaa

SEQ ID NO: 152651 - RNA, 11 nt, Artificial Sequence
  Description of Artificial Sequence: Synthetic oligonucleotide
guacaagaucc

SEQ ID NO: 152652 - RNA, 11 nt, Artificial Sequence
  Description of Artificial Sequence: Synthetic oligonucleotide
guacuugcaga

SEQ ID NO: 152653 - RNA, 12 nt, Artificial Sequence
  Description of Artificial Sequence: Synthetic oligonucleotide
gaucgauacaga

SEQ ID NO: 152654 - RNA, 12 nt, Artificial Sequence
  Description of Artificial Sequence: Synthetic oligonucleotide
auaaaaauaaau

SEQ ID NO: 152655 - RNA, 12 nt, Artificial Sequence
  Description of Artificial Sequence: Synthetic oligonucleotide
aaaaauaaauau

SEQ ID NO: 152656 - RNA, 12 nt, Artificial Sequence
  Description of Artificial Sequence: Synthetic oligonucleotide
uugacugcugug

SEQ ID NO: 152657 - RNA, 12 nt, Artificial Sequence
  Description of Artificial Sequence: Synthetic oligonucleotide
gagaugagagac

SEQ ID NO: 152658 - RNA, 9 nt, Artificial Sequence
  Description of Artificial Sequence: Synthetic oligonucleotide
cccacuugg

SEQ ID NO: 152659 - RNA, 6641 nt, Homo sapiens
gcccucgccgcccgcggcgccccgagcgcuuugugagcagaugcggagccgaguggagggcgcgagccagaugcggggcgacagcugacuugcugagaggaggcggggaggcgcggagcgcgcgugugguccuugcgccgcugacuucuccacugguuccugggcaccgaaagauaaaccucucauaaugaaggcccccgcugugcuugcaccuggcauccucgugcuccuguuuaccuuggugcagaggagcaauggggaguguaaagaggcacuagcaaaguccgagaugaaugugaauaugaaguaucagcuucccaacuucaccgcggaaacacccauccagaaugucauucuacaugagcaucacauuuuccuuggugccacuaacuacauuuauguuuuaaaugaggaagaccuucagaagguugcugaguacaagacugggccugugcuggaacacccagauuguuucccaugucaggacugcagcagcaaagccaauuuaucaggagguguuuggaaagauaacaucaacauggcucuaguugucgacaccuacuaugaugaucaacucauuagcuguggcagcgucaacagagggaccugccagcgacaugucuuuccccacaaucauacugcugacauacagucggagguucacugcauauucuccccacagauagaagagcccagccaguguccugacuguguggugagcgcccugggagccaaaguccuuucaucuguaaaggaccgguucaucaacuucuuuguaggcaauaccauaaauucuucuuauuucccagaucauccauugcauucgauaucagugagaaggcuaaaggaaacgaaagaugguuuuauguuuuugacggaccaguccuacauugauguuuuaccugaguucagagauucuuaccccauuaaguauguccaugccuuugaaagcaacaauuuuauuuacuucuugacgguccaaagggaaacucuagaugcucagacuuuucacacaagaauaaucagguucuguuccauaaacucuggauugcauuccuacauggaaaugccucuggaguguauucucacagaaaagagaaaaaagagauccacaaagaaggaaguguuuaauauacuucaggcugcguaugucagcaagccuggggcccagcuugcuagacaaauaggagccagccugaaugaugacauucuuuucgggguguucgcacaaagcaagccagauucugccgaaccaauggaucgaucugccaugugugcauucccuaucaaauaugucaacgacuucuucaacaagaucgucaacaaaaacaaugugagaugucuccagcauuuuuacggacccaaucaugagcacugcuuuaauaggacacuucugagaaauucaucaggcugugaagcgcgccgugaugaauaucgaacagaguuuaccacagcuuugcagcgcguugacuuauucaugggucaauucagcgaaguccucuuaacaucuauauccaccuucauuaaaggagaccucaccauagcuaaucuugggacaucagagggucgcuucaugcagguugugguuucucgaucaggaccaucaaccccucaugugaauuuucuccuggacucccauccagugucuccagaagugauuguggagcauacauuaaaccaaaauggcuacacacugguuaucacugggaagaagaucacgaagaucccauugaauggcuugggcugcagacauuuccaguccugcagucaaugccucucugccccacccuuuguucaguguggcuggugccacgacaaaugugugcgaucggaggaaugccugagcgggacauggacucaacagaucugucugccugcaaucuacaagguuuucccaaauagugcaccccuugaaggagggacaaggcugaccauauguggcugggacuuuggauuucggaggaauaauaaauuugauuuaaagaaaacuagaguucuccuuggaaaugagagcugcaccuugacuuuaagugagagcacgaugaauacauugaaaugcacaguugguccugccaugaauaagcauuucaauauguccauaauuauuucaaauggccacgggacaacacaauacaguacauucuccuauguggauccuguaauaacaaguauuucgccgaaauacgguccuauggcugguggcacuuuacuuacuuuaacuggaaauuaccuaaacagugggaauucuagacacauuucaauugguggaaaaacauguacuuuaaaaagugugucaaacaguauucuugaauguuauaccccagcccaaaccauuucaacugaguuugcuguuaaauugaaaauugacuuagccaaccgagagacaagcaucuucaguuaccgugaagaucccauugucuaugaaauucauccaaccaaaucuuuuauuaguggugggagcacaauaacagguguugggaaaaaccugaauucaguuagugucccgagaauggucauaaaugugcaugaagcaggaaggaacuuuacaguggcaugucaacaucgcucuaauucagagauaaucuguuguaccacuccuucccugcaacagcugaaucugcaacucccccugaaaaccaaagccuuuuucauguuagaugggauccuuuccaaauacuuugaucucauuuauguacauaauccuguguuuaagccuuuugaaaagccagugaugaucucaaugggcaaugaaaauguacuggaaauuaagggaaaugauauugacccugaagcaguuaaaggugaaguguuaaaaguuggaaauaagagcugugagaauauacacuuacauucugaagccguuuuaugcacgguccccaaugaccugcugaaauugaacagcgagcuaaauauagaguggaagcaagcaauuucuucaaccguccuuggaaaaguaauaguucaaccagaucagaauuucacaggauugauugcugguguugucucaauaucaacagcacuguuauuacuacuuggguuuuuccuguggcugaaaaagagaaagcaaauuaaagaucugggcagugaauuaguucgcuacgaugcaagaguacacacuccucauuuggauaggcuuguaagugcccgaaguguaagcccaacuacagaaaugguuucaaaugaaucuguagacuaccgagcuacuuuuccagaagaucaguuuccuaauucaucucagaacgguucaugccgacaagugcaguauccucugacagacaugucccccauccuaacuaguggggacucugauauauccaguccauuacugcaaaauacuguccacauugaccucagugcucuaaauccagagcugguccaggcagugcagcauguagugauugggcccaguagccugauugugcauuucaaugaagucauaggaagagggcauuuugguuguguauaucaugggacuuuguuggacaaugauggcaagaaaauucacugugcugugaaauccuugaacagaaucacugacauaggagaaguuucccaauuucugaccgagggaaucaucaugaaagauuuuagucaucccaauguccucucgcuccugggaaucugccugcgaagugaagggucuccgcuggugguccuaccauacaugaaacauggagaucuucgaaauuucauucgaaaugagacucauaauccaacuguaaaagaucuuauuggcuuuggucuucaaguagccaaaggcaugaaauaucuugcaagcaaaaaguuuguccacagagacuuggcugcaagaaacuguaugcuggaugaaaaauucacagucaagguugcugauuuuggucuugccagagacauguaugauaaagaauacuauaguguacacaacaaaacaggugcaaagcugccagugaaguggauggcuuuggaaagucugcaaacucaaaaguuuaccaccaagucagaugugugguccuuuggcgugcuccucugggagcugaugacaagaggagccccaccuuauccugacguaaacaccuuugauauaacuguuuacuuguugcaagggagaagacuccuacaacccgaauacugcccagaccccuuauaugaaguaaugcuaaaaugcuggcacccuaaagccgaaaugcgcccauccuuuucugaacuggugucccggauaucagcgaucuucucuacuuucauuggggagcacuauguccaugugaacgcuacuuaugugaacguaaaaugugucgcuccguauccuucucuguugucaucagaagauaacgcugaugaugagguggacacacgaccagccuccuucugggagacaucauagugcuaguacuaugucaaagcaacaguccacacuuuguccaaugguuuuuucacugccugaccuuuaaaaggccaucgauauucuuugcucuugccaaaauugcacuauuauaggacuuguauuguuauuuaaauuacuggauucuaaggaauuucuuaucugacagagcaucagaaccagaggcuuggucccacaggccacggaccaauggccugcagccgugacaacacuccugucauauuggaguccaaaacuugaauucuggguugaauuuuuuaaaaaucagguaccacuugauuucauaugggaaauugaagcaggaaauauugagggcuucuugaucacagaaaacucagaagagauaguaaugcucaggacaggagcggcagccccagaacaggccacucauuuagaauucuaguguuucaaaacacuuuuguguguuguauggucaauaacauuuuucauuacugauggugucauucacccauuagguaaacauucccuuuuaaauguuuguuuguuuuuugagacaggaucucacucuguugccagggcuguagugcaguggugugaucauagcucacugcaaccuccaccucccaggcucaagccucccgaauagcugggacuacaggcgcacaccaccauccccggcuaauuuuuguauuuuuuguagagacgggguuuugccauguugccaaggcugguuucaaacuccuggacucaagaaauccacccaccucagccucccaaagugcuaggauuacaggcaugagccacugcgcccagcccuuauaaauuuuuguauagacauuccuuugguuggaagaauauuuauaggcaauacagucaaaguuucaaaauagcaucacacaaaacauguuuauaaaugaacaggauguaauguacauagaugacauuaagaaaauuuguaugaaauaauuuagucaucaugaaauauuuaguugucauauaaaaacccacuguuugagaaugaugcuacucugaucuaaugaaugugaacauguagauguuuuguguguauuuuuuuaaaugaaaacucaaaauaagacaaguaauuuguugauaaauauuuuuaaagauaacucagcauguuuguaaagcaggauacauuuuacuaaaagguucauugguuccaaucacagcucauagguagagcaaagaaaggguggauggauugaaaagauuagccucugucucgguggcagguucccaccucgcaagcaauuggaaacaaaacuuuuggggaguuuuauuuugcauuaggguguguuuuauguuaagcaaaacauacuuuagaaacaaaugaaaaaggcaauugaaaaucccagcuauuucaccuagauggaauagccacccugagcagaacuuugugaugcuucauucuguggaauuuugugcuugcuacuguauagugcaugugguguagguuacucuaacugguuuugucgacguaaacauuuaaaguguuauauuuuuuauaaaaauguuuauuuuuaaugauaugagaaaaauuuuguuaggccacaaaaacacugcacugugaacauuuuagaaaagguaugucagacugggauuaaugacagcaugauuuucaaugacuguaaauugcgauaaggaaauguacugauugccaauacaccccacccucauuacaucaucaggacuugaagccaaggguuaacccagcaagcuacaaagagggugugucacacugaaacucaauaguugaguuuggcuguuguugcaggaaaaugauuauaacuaaaagcucucugauagugcagagacuuaccagaagacacaaggaauuguacugaagagcuauuacaauccaaauauugccguuucauaaauguaauaaguaauacuaauucacagaguauuguaaaugguggaugacaaaagaaaaucugcucuguggaaagaaagaacugucucuaccagggucaagagcaugaacgcaucaauagaaagaacucggggaaacaucccaucaacaggacuacacacuuguauauacauucuugagaacacugcaaugugaaaaucacguuugcuauuuauaaacuuguccuuagauuaaugugucuggacagauugugggaguaagugauucuucuaagaauuagauacuugucacugccuauaccugcagcugaacugaaugguacuucguauguuaauaguuguucugauaaaucaugcaauuaaaguaaagugaugcaacaucuuguaaaaaaaaaaaaaaaaaaaa

SEQ ID NO: 152660 - RNA, 19 nt, Artificial Sequence
  Description of Artificial Sequence: Synthetic oligonucleotide
gcccucgccgcccgcggcg

SEQ ID NO: 152661 - RNA, 19 nt, Artificial Sequence
  Description of Artificial Sequence: Synthetic oligonucleotide
gccccgagcgcuuugugag

SEQ ID NO: 152662 - RNA, 19 nt, Artificial Sequence
  Description of Artificial Sequence: Synthetic oligonucleotide
gcagaugcggagccgagug

SEQ ID NO: 152663 - RNA, 19 nt, Artificial Sequence
  Description of Artificial Sequence: Synthetic oligonucleotide
ggagggcgcgagccagaug

SEQ ID NO: 152664 - RNA, 19 nt, Artificial Sequence
  Description of Artificial Sequence: Synthetic oligonucleotide
gcggggcgacagcugacuu

SEQ ID NO: 152665 - RNA, 19 nt, Artificial Sequence
  Description of Artificial Sequence: Synthetic oligonucleotide
ugcugagaggaggcgggga

SEQ ID NO: 152666 - RNA, 19 nt, Artificial Sequence
  Description of Artificial Sequence: Synthetic oligonucleotide
aggcgcggagcgcgcgugu

SEQ ID NO: 152667 - RNA, 19 nt, Artificial Sequence
  Description of Artificial Sequence: Synthetic oligonucleotide
ugguccuugcgccgcugac

SEQ ID NO: 152668 - RNA, 19 nt, Artificial Sequence
  Description of Artificial Sequence: Synthetic oligonucleotide
cuucuccacugguuccugg

SEQ ID NO: 152669 - RNA, 19 nt, Artificial Sequence
  Description of Artificial Sequence: Synthetic oligonucleotide
ggcaccgaaagauaaaccu

SEQ ID NO: 152670 - RNA, 19 nt, Artificial Sequence
  Description of Artificial Sequence: Synthetic oligonucleotide
ucucauaaugaaggccccc

SEQ ID NO: 152671 - RNA, 19 nt, Artificial Sequence
  Description of Artificial Sequence: Synthetic oligonucleotide
cgcugugcuugcaccuggc

SEQ ID NO: 152672 - RNA, 19 nt, Artificial Sequence
  Description of Artificial Sequence: Synthetic oligonucleotide
cauccucgugcuccuguuu

SEQ ID NO: 152673 - RNA, 19 nt, Artificial Sequence
  Description of Artificial Sequence: Synthetic oligonucleotide
uaccuuggugcagaggagc

SEQ ID NO: 152674 - RNA, 19 nt, Artificial Sequence
  Description of Artificial Sequence: Synthetic oligonucleotide
caauggggaguguaaagag

SEQ ID NO: 152675 - RNA, 19 nt, Artificial Sequence
  Description of Artificial Sequence: Synthetic oligonucleotide
ggcacuagcaaaguccgag

SEQ ID NO: 152676 - RNA, 19 nt, Artificial Sequence
  Description of Artificial Sequence: Synthetic oligonucleotide
gaugaaugugaauaugaag

SEQ ID NO: 152677 - RNA, 19 nt, Artificial Sequence
  Description of Artificial Sequence: Synthetic oligonucleotide
guaucagcuucccaacuuc

SEQ ID NO: 152678 - RNA, 19 nt, Artificial Sequence
  Description of Artificial Sequence: Synthetic oligonucleotide
caccgcggaaacacccauc

SEQ ID NO: 152679 - RNA, 19 nt, Artificial Sequence
  Description of Artificial Sequence: Synthetic oligonucleotide
ccagaaugucauucuacau

SEQ ID NO: 152680 - RNA, 19 nt, Artificial Sequence
  Description of Artificial Sequence: Synthetic oligonucleotide
ugagcaucacauuuuccuu

SEQ ID NO: 152681 - RNA, 19 nt, Artificial Sequence
  Description of Artificial Sequence: Synthetic oligonucleotide
uggugccacuaacuacauu

SEQ ID NO: 152682 - RNA, 19 nt, Artificial Sequence
  Description of Artificial Sequence: Synthetic oligonucleotide
uuauguuuuaaaugaggaa

SEQ ID NO: 152683 - RNA, 19 nt, Artificial Sequence
  Description of Artificial Sequence: Synthetic oligonucleotide
agaccuucagaagguugcu

SEQ ID NO: 152684 - RNA, 19 nt, Artificial Sequence
  Description of Artificial Sequence: Synthetic oligonucleotide
ugaguacaagacugggccu

SEQ ID NO: 152685 - RNA, 19 nt, Artificial Sequence
  Description of Artificial Sequence: Synthetic oligonucleotide
ugugcuggaacacccagau

SEQ ID NO: 152686 - RNA, 19 nt, Artificial Sequence
  Description of Artificial Sequence: Synthetic oligonucleotide
uuguuucccaugucaggac

SEQ ID NO: 152687 - RNA, 19 nt, Artificial Sequence
  Description of Artificial Sequence: Synthetic oligonucleotide
cugcagcagcaaagccaau

SEQ ID NO: 152688 - RNA, 19 nt, Artificial Sequence
  Description of Artificial Sequence: Synthetic oligonucleotide
uuuaucaggagguguuugg

SEQ ID NO: 152689 - RNA, 19 nt, Artificial Sequence
  Description of Artificial Sequence: Synthetic oligonucleotide
gaaagauaacaucaacaug

SEQ ID NO: 152690 - RNA, 19 nt, Artificial Sequence
  Description of Artificial Sequence: Synthetic oligonucleotide
ggcucuaguugucgacacc

SEQ ID NO: 152691 - RNA, 19 nt, Artificial Sequence
  Description of Artificial Sequence: Synthetic oligonucleotide
cuacuaugaugaucaacuc

SEQ ID NO: 152692 - RNA, 19 nt, Artificial Sequence
  Description of Artificial Sequence: Synthetic oligonucleotide
cauuagcuguggcagcguc

SEQ ID NO: 152693 - RNA, 19 nt, Artificial Sequence
  Description of Artificial Sequence: Synthetic oligonucleotide
caacagagggaccugccag

SEQ ID NO: 152694 - RNA, 19 nt, Artificial Sequence
  Description of Artificial Sequence: Synthetic oligonucleotide
gcgacaugucuuuccccac

SEQ ID NO: 152695 - RNA, 19 nt, Artificial Sequence
  Description of Artificial Sequence: Synthetic oligonucleotide
caaucauacugcugacaua

SEQ ID NO: 152696 - RNA, 19 nt, Artificial Sequence
  Description of Artificial Sequence: Synthetic oligonucleotide
acagucggagguucacugc

SEQ ID NO: 152697 - RNA, 19 nt, Artificial Sequence
  Description of Artificial Sequence: Synthetic oligonucleotide
cauauucuccccacagaua

SEQ ID NO: 152698 - RNA, 19 nt, Artificial Sequence
  Description of Artificial Sequence: Synthetic oligonucleotide
agaagagcccagccagugu

SEQ ID NO: 152699 - RNA, 19 nt, Artificial Sequence
  Description of Artificial Sequence: Synthetic oligonucleotide
uccugacuguguggugagc

SEQ ID NO: 152700 - RNA, 19 nt, Artificial Sequence
  Description of Artificial Sequence: Synthetic oligonucleotide
cgcccugggagccaaaguc

SEQ ID NO: 152701 - RNA, 19 nt, Artificial Sequence
  Description of Artificial Sequence: Synthetic oligonucleotide
ccuuucaucuguaaaggac

SEQ ID NO: 152702 - RNA, 19 nt, Artificial Sequence
  Description of Artificial Sequence: Synthetic oligonucleotide
ccgguucaucaacuucuuu

SEQ ID NO: 152703 - RNA, 19 nt, Artificial Sequence
  Description of Artificial Sequence: Synthetic oligonucleotide
uguaggcaauaccauaaau

SEQ ID NO: 152704 - RNA, 19 nt, Artificial Sequence
  Description of Artificial Sequence: Synthetic oligonucleotide
uucuucuuauuucccagau

SEQ ID NO: 152705 - RNA, 19 nt, Artificial Sequence
  Description of Artificial Sequence: Synthetic oligonucleotide
ucauccauugcauucgaua

SEQ ID NO: 152706 - RNA, 19 nt, Artificial Sequence
  Description of Artificial Sequence: Synthetic oligonucleotide
aucagugagaaggcuaaag

SEQ ID NO: 152707 - RNA, 19 nt, Artificial Sequence
  Description of Artificial Sequence: Synthetic oligonucleotide
ggaaacgaaagaugguuuu

SEQ ID NO: 152708 - RNA, 19 nt, Artificial Sequence
  Description of Artificial Sequence: Synthetic oligonucleotide
uauguuuuugacggaccag

SEQ ID NO: 152709 - RNA, 19 nt, Artificial Sequence
  Description of Artificial Sequence: Synthetic oligonucleotide
guccuacauugauguuuua

SEQ ID NO: 152710 - RNA, 19 nt, Artificial Sequence
  Description of Artificial Sequence: Synthetic oligonucleotide
accugaguucagagauucu

SEQ ID NO: 152711 - RNA, 19 nt, Artificial Sequence
  Description of Artificial Sequence: Synthetic oligonucleotide
uuaccccauuaaguauguc

SEQ ID NO: 152712 - RNA, 19 nt, Artificial Sequence
  Description of Artificial Sequence: Synthetic oligonucleotide
ccaugccuuugaaagcaac

SEQ ID NO: 152713 - RNA, 19 nt, Artificial Sequence
  Description of Artificial Sequence: Synthetic oligonucleotide
caauuuuauuuacuucuug

SEQ ID NO: 152714 - RNA, 19 nt, Artificial Sequence
  Description of Artificial Sequence: Synthetic oligonucleotide
gacgguccaaagggaaacu

SEQ ID NO: 152715 - RNA, 19 nt, Artificial Sequence
  Description of Artificial Sequence: Synthetic oligonucleotide
ucuagaugcucagacuuuu

SEQ ID NO: 152716 - RNA, 19 nt, Artificial Sequence
  Description of Artificial Sequence: Synthetic oligonucleotide
ucacacaagaauaaucagg

SEQ ID NO: 152717 - RNA, 19 nt, Artificial Sequence
  Description of Artificial Sequence: Synthetic oligonucleotide
guucuguuccauaaacucu

SEQ ID NO: 152718 - RNA, 19 nt, Artificial Sequence
  Description of Artificial Sequence: Synthetic oligonucleotide
uggauugcauuccuacaug

SEQ ID NO: 152719 - RNA, 19 nt, Artificial Sequence
  Description of Artificial Sequence: Synthetic oligonucleotide
ggaaaugccucuggagugu

SEQ ID NO: 152720 - RNA, 19 nt, Artificial Sequence
  Description of Artificial Sequence: Synthetic oligonucleotide
uauucucacagaaaagaga

SEQ ID NO: 152721 - RNA, 19 nt, Artificial Sequence
  Description of Artificial Sequence: Synthetic oligonucleotide
aaaaaagagauccacaaag

SEQ ID NO: 152722 - RNA, 19 nt, Artificial Sequence
  Description of Artificial Sequence: Synthetic oligonucleotide
gaaggaaguguuuaauaua

SEQ ID NO: 152723 - RNA, 19 nt, Artificial Sequence
  Description of Artificial Sequence: Synthetic oligonucleotide
acuucaggcugcguauguc

SEQ ID NO: 152724 - RNA, 19 nt, Artificial Sequence
  Description of Artificial Sequence: Synthetic oligonucleotide
cagcaagccuggggcccag

SEQ ID NO: 152725 - RNA, 19 nt, Artificial Sequence
  Description of Artificial Sequence: Synthetic oligonucleotide
gcuugcuagacaaauagga

SEQ ID NO: 152726 - RNA, 19 nt, Artificial Sequence
  Description of Artificial Sequence: Synthetic oligonucleotide
agccagccugaaugaugac

SEQ ID NO: 152727 - RNA, 19 nt, Artificial Sequence
  Description of Artificial Sequence: Synthetic oligonucleotide
cauucuuuucgggguguuc

SEQ ID NO: 152728 - RNA, 19 nt, Artificial Sequence
  Description of Artificial Sequence: Synthetic oligonucleotide
cgcacaaagcaagccagau

SEQ ID NO: 152729 - RNA, 19 nt, Artificial Sequence
  Description of Artificial Sequence: Synthetic oligonucleotide
uucugccgaaccaauggau

SEQ ID NO: 152730 - RNA, 19 nt, Artificial Sequence
  Description of Artificial Sequence: Synthetic oligonucleotide
ucgaucugccaugugugca

SEQ ID NO: 152731 - RNA, 19 nt, Artificial Sequence
  Description of Artificial Sequence: Synthetic oligonucleotide
auucccuaucaaauauguc

SEQ ID NO: 152732 - RNA, 19 nt, Artificial Sequence
  Description of Artificial Sequence: Synthetic oligonucleotide
caacgacuucuucaacaag

SEQ ID NO: 152733 - RNA, 19 nt, Artificial Sequence
  Description of Artificial Sequence: Synthetic oligonucleotide
gaucgucaacaaaaacaau

SEQ ID NO: 152734 - RNA, 19 nt, Artificial Sequence
  Description of Artificial Sequence: Synthetic oligonucleotide
ugugagaugucuccagcau

SEQ ID NO: 152735 - RNA, 19 nt, Artificial Sequence
  Description of Artificial Sequence: Synthetic oligonucleotide
uuuuuacggacccaaucau

SEQ ID NO: 152736 - RNA, 19 nt, Artificial Sequence
  Description of Artificial Sequence: Synthetic oligonucleotide
ugagcacugcuuuaauagg

SEQ ID NO: 152737 - RNA, 19 nt, Artificial Sequence
  Description of Artificial Sequence: Synthetic oligonucleotide
gacacuucugagaaauuca

SEQ ID NO: 152738 - RNA, 19 nt, Artificial Sequence
  Description of Artificial Sequence: Synthetic oligonucleotide
aucaggcugugaagcgcgc

SEQ ID NO: 152739 - RNA, 19 nt, Artificial Sequence
  Description of Artificial Sequence: Synthetic oligonucleotide
ccgugaugaauaucgaaca

SEQ ID NO: 152740 - RNA, 19 nt, Artificial Sequence
  Description of Artificial Sequence: Synthetic oligonucleotide
agaguuuaccacagcuuug

SEQ ID NO: 152741 - RNA, 19 nt, Artificial Sequence
  Description of Artificial Sequence: Synthetic oligonucleotide
gcagcgcguugacuuauuc

SEQ ID NO: 152742 - RNA, 19 nt, Artificial Sequence
  Description of Artificial Sequence: Synthetic oligonucleotide
caugggucaauucagcgaa

SEQ ID NO: 152743 - RNA, 19 nt, Artificial Sequence
  Description of Artificial Sequence: Synthetic oligonucleotide
aguccucuuaacaucuaua

SEQ ID NO: 152744 - RNA, 19 nt, Artificial Sequence
  Description of Artificial Sequence: Synthetic oligonucleotide
auccaccuucauuaaagga

SEQ ID NO: 152745 - RNA, 19 nt, Artificial Sequence
  Description of Artificial Sequence: Synthetic oligonucleotide
agaccucaccauagcuaau

SEQ ID NO: 152746 - RNA, 19 nt, Artificial Sequence
  Description of Artificial Sequence: Synthetic oligonucleotide
ucuugggacaucagagggu

SEQ ID NO: 152747 - RNA, 19 nt, Artificial Sequence
  Description of Artificial Sequence: Synthetic oligonucleotide
ucgcuucaugcagguugug

SEQ ID NO: 152748 - RNA, 19 nt, Artificial Sequence
  Description of Artificial Sequence: Synthetic oligonucleotide
gguuucucgaucaggacca

SEQ ID NO: 152749 - RNA, 19 nt, Artificial Sequence
  Description of Artificial Sequence: Synthetic oligonucleotide
aucaaccccucaugugaau

SEQ ID NO: 152750 - RNA, 19 nt, Artificial Sequence
  Description of Artificial Sequence: Synthetic oligonucleotide
uuuucuccuggacucccau

SEQ ID NO: 152751 - RNA, 19 nt, Artificial Sequence
  Description of Artificial Sequence: Synthetic oligonucleotide
uccagugucuccagaagug

SEQ ID NO: 152752 - RNA, 19 nt, Artificial Sequence
  Description of Artificial Sequence: Synthetic oligonucleotide
gauuguggagcauacauua

SEQ ID NO: 152753 - RNA, 19 nt, Artificial Sequence
  Description of Artificial Sequence: Synthetic oligonucleotide
aaaccaaaauggcuacaca

SEQ ID NO: 152754 - RNA, 19 nt, Artificial Sequence
  Description of Artificial Sequence: Synthetic oligonucleotide
acugguuaucacugggaag

SEQ ID NO: 152755 - RNA, 19 nt, Artificial Sequence
  Description of Artificial Sequence: Synthetic oligonucleotide
gaagaucacgaagauccca

SEQ ID NO: 152756 - RNA, 19 nt, Artificial Sequence
  Description of Artificial Sequence: Synthetic oligonucleotide
auugaauggcuugggcugc

SEQ ID NO: 152757 - RNA, 19 nt, Artificial Sequence
  Description of Artificial Sequence: Synthetic oligonucleotide
cagacauuuccaguccugc

SEQ ID NO: 152758 - RNA, 19 nt, Artificial Sequence
  Description of Artificial Sequence: Synthetic oligonucleotide
cagucaaugccucucugcc

SEQ ID NO: 152759 - RNA, 19 nt, Artificial Sequence
  Description of Artificial Sequence: Synthetic oligonucleotide
cccacccuuuguucagugu

SEQ ID NO: 152760 - RNA, 19 nt, Artificial Sequence
  Description of Artificial Sequence: Synthetic oligonucleotide
uggcuggugccacgacaaa

SEQ ID NO: 152761 - RNA, 19 nt, Artificial Sequence
  Description of Artificial Sequence: Synthetic oligonucleotide
augugugcgaucggaggaa

SEQ ID NO: 152762 - RNA, 19 nt, Artificial Sequence
  Description of Artificial Sequence: Synthetic oligonucleotide
augccugagcgggacaugg

SEQ ID NO: 152763 - RNA, 19 nt, Artificial Sequence
  Description of Artificial Sequence: Synthetic oligonucleotide
gacucaacagaucugucug

SEQ ID NO: 152764 - RNA, 19 nt, Artificial Sequence
  Description of Artificial Sequence: Synthetic oligonucleotide
gccugcaaucuacaagguu

SEQ ID NO: 152765 - RNA, 19 nt, Artificial Sequence
  Description of Artificial Sequence: Synthetic oligonucleotide
uuucccaaauagugcaccc

SEQ ID NO: 152766 - RNA, 19 nt, Artificial Sequence
  Description of Artificial Sequence: Synthetic oligonucleotide
ccuugaaggagggacaagg

SEQ ID NO: 152767 - RNA, 19 nt, Artificial Sequence
  Description of Artificial Sequence: Synthetic oligonucleotide
gcugaccauauguggcugg

SEQ ID NO: 152768 - RNA, 19 nt, Artificial Sequence
  Description of Artificial Sequence: Synthetic oligonucleotide
ggacuuuggauuucggagg

SEQ ID NO: 152769 - RNA, 19 nt, Artificial Sequence
  Description of Artificial Sequence: Synthetic oligonucleotide
gaauaauaaauuugauuua

SEQ ID NO: 152770 - RNA, 19 nt, Artificial Sequence
  Description of Artificial Sequence: Synthetic oligonucleotide
aaagaaaacuagaguucuc

SEQ ID NO: 152771 - RNA, 19 nt, Artificial Sequence
  Description of Artificial Sequence: Synthetic oligonucleotide
ccuuggaaaugagagcugc

SEQ ID NO: 152772 - RNA, 19 nt, Artificial Sequence
  Description of Artificial Sequence: Synthetic oligonucleotide
caccuugacuuuaagugag

SEQ ID NO: 152773 - RNA, 19 nt, Artificial Sequence
  Description of Artificial Sequence: Synthetic oligonucleotide
gagcacgaugaauacauug

SEQ ID NO: 152774 - RNA, 19 nt, Artificial Sequence
  Description of Artificial Sequence: Synthetic oligonucleotide
gaaaugcacaguugguccu

SEQ ID NO: 152775 - RNA, 19 nt, Artificial Sequence
  Description of Artificial Sequence: Synthetic oligonucleotide
ugccaugaauaagcauuuc

SEQ ID NO: 152776 - RNA, 19 nt, Artificial Sequence
  Description of Artificial Sequence: Synthetic oligonucleotide
caauauguccauaauuauu

SEQ ID NO: 152777 - RNA, 19 nt, Artificial Sequence
  Description of Artificial Sequence: Synthetic oligonucleotide
uucaaauggccacgggaca

SEQ ID NO: 152778 - RNA, 19 nt, Artificial Sequence
  Description of Artificial Sequence: Synthetic oligonucleotide
aacacaauacaguacauuc

SEQ ID NO: 152779 - RNA, 19 nt, Artificial Sequence
  Description of Artificial Sequence: Synthetic oligonucleotide
cuccuauguggauccugua

SEQ ID NO: 152780 - RNA, 19 nt, Artificial Sequence
  Description of Artificial Sequence: Synthetic oligonucleotide
aauaacaaguauuucgccg

SEQ ID NO: 152781 - RNA, 19 nt, Artificial Sequence
  Description of Artificial Sequence: Synthetic oligonucleotide
gaaauacgguccuauggcu

SEQ ID NO: 152782 - RNA, 19 nt, Artificial Sequence
  Description of Artificial Sequence: Synthetic oligonucleotide
ugguggcacuuuacuuacu

SEQ ID NO: 152783 - RNA, 19 nt, Artificial Sequence
  Description of Artificial Sequence: Synthetic oligonucleotide
uuuaacuggaaauuaccua

SEQ ID NO: 152784 - RNA, 19 nt, Artificial Sequence
  Description of Artificial Sequence: Synthetic oligonucleotide
aaacagugggaauucuaga

SEQ ID NO: 152785 - RNA, 19 nt, Artificial Sequence
  Description of Artificial Sequence: Synthetic oligonucleotide
acacauuucaauuggugga

SEQ ID NO: 152786 - RNA, 19 nt, Artificial Sequence
  Description of Artificial Sequence: Synthetic oligonucleotide
aaaaacauguacuuuaaaa

SEQ ID NO: 152787 - RNA, 19 nt, Artificial Sequence
  Description of Artificial Sequence: Synthetic oligonucleotide
aagugugucaaacaguauu

SEQ ID NO: 152788 - RNA, 19 nt, Artificial Sequence
  Description of Artificial Sequence: Synthetic oligonucleotide
ucuugaauguuauacccca

SEQ ID NO: 152789 - RNA, 19 nt, Artificial Sequence
  Description of Artificial Sequence: Synthetic oligonucleotide
agcccaaaccauuucaacu

SEQ ID NO: 152790 - RNA, 19 nt, Artificial Sequence
  Description of Artificial Sequence: Synthetic oligonucleotide
ugaguuugcuguuaaauug

SEQ ID NO: 152791 - RNA, 19 nt, Artificial Sequence
  Description of Artificial Sequence: Synthetic oligonucleotide
gaaaauugacuuagccaac

SEQ ID NO: 152792 - RNA, 19 nt, Artificial Sequence
  Description of Artificial Sequence: Synthetic oligonucleotide
ccgagagacaagcaucuuc

SEQ ID NO: 152793 - RNA, 19 nt, Artificial Sequence
  Description of Artificial Sequence: Synthetic oligonucleotide
caguuaccgugaagauccc

SEQ ID NO: 152794 - RNA, 19 nt, Artificial Sequence
  Description of Artificial Sequence: Synthetic oligonucleotide
cauugucuaugaaauucau

SEQ ID NO: 152795 - RNA, 19 nt, Artificial Sequence
  Description of Artificial Sequence: Synthetic oligonucleotide
uccaaccaaaucuuuuauu

SEQ ID NO: 152796 - RNA, 19 nt, Artificial Sequence
  Description of Artificial Sequence: Synthetic oligonucleotide
uaguggugggagcacaaua

SEQ ID NO: 152797 - RNA, 19 nt, Artificial Sequence
  Description of Artificial Sequence: Synthetic oligonucleotide
aacagguguugggaaaaac

SEQ ID NO: 152798 - RNA, 19 nt, Artificial Sequence
  Description of Artificial Sequence: Synthetic oligonucleotide
ccugaauucaguuaguguc

SEQ ID NO: 152799 - RNA, 19 nt, Artificial Sequence
  Description of Artificial Sequence: Synthetic oligonucleotide
cccgagaauggucauaaau

SEQ ID NO: 152800 - RNA, 19 nt, Artificial Sequence
  Description of Artificial Sequence: Synthetic oligonucleotide
ugugcaugaagcaggaagg

SEQ ID NO: 152801 - RNA, 19 nt, Artificial Sequence
  Description of Artificial Sequence: Synthetic oligonucleotide
gaacuuuacaguggcaugu

SEQ ID NO: 152802 - RNA, 19 nt, Artificial Sequence
  Description of Artificial Sequence: Synthetic oligonucleotide
ucaacaucgcucuaauuca

SEQ ID NO: 152803 - RNA, 19 nt, Artificial Sequence
  Description of Artificial Sequence: Synthetic oligonucleotide
agagauaaucuguuguacc

SEQ ID NO: 152804 - RNA, 19 nt, Artificial Sequence
  Description of Artificial Sequence: Synthetic oligonucleotide
cacuccuucccugcaacag

SEQ ID NO: 152805 - RNA, 19 nt, Artificial Sequence
  Description of Artificial Sequence: Synthetic oligonucleotide
gcugaaucugcaacucccc

SEQ ID NO: 152806 - RNA, 19 nt, Artificial Sequence
  Description of Artificial Sequence: Synthetic oligonucleotide
ccugaaaaccaaagccuuu

SEQ ID NO: 152807 - RNA, 19 nt, Artificial Sequence
  Description of Artificial Sequence: Synthetic oligonucleotide
uuucauguuagaugggauc

SEQ ID NO: 152808 - RNA, 19 nt, Artificial Sequence
  Description of Artificial Sequence: Synthetic oligonucleotide
ccuuuccaaauacuuugau

SEQ ID NO: 152809 - RNA, 19 nt, Artificial Sequence
  Description of Artificial Sequence: Synthetic oligonucleotide
ucucauuuauguacauaau

SEQ ID NO: 152810 - RNA, 19 nt, Artificial Sequence
  Description of Artificial Sequence: Synthetic oligonucleotide
uccuguguuuaagccuuuu

SEQ ID NO: 152811 - RNA, 19 nt, Artificial Sequence
  Description of Artificial Sequence: Synthetic oligonucleotide
ugaaaagccagugaugauc

SEQ ID NO: 152812 - RNA, 19 nt, Artificial Sequence
  Description of Artificial Sequence: Synthetic oligonucleotide
cucaaugggcaaugaaaau

SEQ ID NO: 152813 - RNA, 19 nt, Artificial Sequence
  Description of Artificial Sequence: Synthetic oligonucleotide
uguacuggaaauuaaggga

SEQ ID NO: 152814 - RNA, 19 nt, Artificial Sequence
  Description of Artificial Sequence: Synthetic oligonucleotide
aaaugauauugacccugaa

SEQ ID NO: 152815 - RNA, 19 nt, Artificial Sequence
  Description of Artificial Sequence: Synthetic oligonucleotide
agcaguuaaaggugaagug

SEQ ID NO: 152816 - RNA, 19 nt, Artificial Sequence
  Description of Artificial Sequence: Synthetic oligonucleotide
guuaaaaguuggaaauaag

SEQ ID NO: 152817 - RNA, 19 nt, Artificial Sequence
  Description of Artificial Sequence: Synthetic oligonucleotide
gagcugugagaauauacac

SEQ ID NO: 152818 - RNA, 19 nt, Artificial Sequence
  Description of Artificial Sequence: Synthetic oligonucleotide
cuuacauucugaagccguu

SEQ ID NO: 152819 - RNA, 19 nt, Artificial Sequence
  Description of Artificial Sequence: Synthetic oligonucleotide
uuuaugcacgguccccaau

SEQ ID NO: 152820 - RNA, 19 nt, Artificial Sequence
  Description of Artificial Sequence: Synthetic oligonucleotide
ugaccugcugaaauugaac

SEQ ID NO: 152821 - RNA, 19 nt, Artificial Sequence
  Description of Artificial Sequence: Synthetic oligonucleotide
cagcgagcuaaauauagag

SEQ ID NO: 152822 - RNA, 19 nt, Artificial Sequence
  Description of Artificial Sequence: Synthetic oligonucleotide
guggaagcaagcaauuucu

SEQ ID NO: 152823 - RNA, 19 nt, Artificial Sequence
  Description of Artificial Sequence: Synthetic oligonucleotide
uucaaccguccuuggaaaa

SEQ ID NO: 152824 - RNA, 19 nt, Artificial Sequence
  Description of Artificial Sequence: Synthetic oligonucleotide
aguaauaguucaaccagau

SEQ ID NO: 152825 - RNA, 19 nt, Artificial Sequence
  Description of Artificial Sequence: Synthetic oligonucleotide
ucagaauuucacaggauug

SEQ ID NO: 152826 - RNA, 19 nt, Artificial Sequence
  Description of Artificial Sequence: Synthetic oligonucleotide
gauugcugguguugucuca

SEQ ID NO: 152827 - RNA, 19 nt, Artificial Sequence
  Description of Artificial Sequence: Synthetic oligonucleotide
aauaucaacagcacuguua

SEQ ID NO: 152828 - RNA, 19 nt, Artificial Sequence
  Description of Artificial Sequence: Synthetic oligonucleotide
auuacuacuuggguuuuuc

SEQ ID NO: 152829 - RNA, 19 nt, Artificial Sequence
  Description of Artificial Sequence: Synthetic oligonucleotide
ccuguggcugaaaaagaga

SEQ ID NO: 152830 - RNA, 19 nt, Artificial Sequence
  Description of Artificial Sequence: Synthetic oligonucleotide
aaagcaaauuaaagaucug

SEQ ID NO: 152831 - RNA, 19 nt, Artificial Sequence
  Description of Artificial Sequence: Synthetic oligonucleotide
gggcagugaauuaguucgc

SEQ ID NO: 152832 - RNA, 19 nt, Artificial Sequence
  Description of Artificial Sequence: Synthetic oligonucleotide
cuacgaugcaagaguacac

SEQ ID NO: 152833 - RNA, 19 nt, Artificial Sequence
  Description of Artificial Sequence: Synthetic oligonucleotide
cacuccucauuuggauagg

SEQ ID NO: 152834 - RNA, 19 nt, Artificial Sequence
  Description of Artificial Sequence: Synthetic oligonucleotide
gcuuguaagugcccgaagu

SEQ ID NO: 152835 - RNA, 19 nt, Artificial Sequence
  Description of Artificial Sequence: Synthetic oligonucleotide
uguaagcccaacuacagaa

SEQ ID NO: 152836 - RNA, 19 nt, Artificial Sequence
  Description of Artificial Sequence: Synthetic oligonucleotide
aaugguuucaaaugaaucu

SEQ ID NO: 152837 - RNA, 19 nt, Artificial Sequence
  Description of Artificial Sequence: Synthetic oligonucleotide
uguagacuaccgagcuacu

SEQ ID NO: 152838 - RNA, 19 nt, Artificial Sequence
  Description of Artificial Sequence: Synthetic oligonucleotide
uuuuccagaagaucaguuu

SEQ ID NO: 152839 - RNA, 19 nt, Artificial Sequence
  Description of Artificial Sequence: Synthetic oligonucleotide
uccuaauucaucucagaac

SEQ ID NO: 152840 - RNA, 19 nt, Artificial Sequence
  Description of Artificial Sequence: Synthetic oligonucleotide
cgguucaugccgacaagug

SEQ ID NO: 152841 - RNA, 19 nt, Artificial Sequence
  Description of Artificial Sequence: Synthetic oligonucleotide
gcaguauccucugacagac

SEQ ID NO: 152842 - RNA, 19 nt, Artificial Sequence
  Description of Artificial Sequence: Synthetic oligonucleotide
caugucccccauccuaacu

SEQ ID NO: 152843 - RNA, 19 nt, Artificial Sequence
  Description of Artificial Sequence: Synthetic oligonucleotide
uaguggggacucugauaua

SEQ ID NO: 152844 - RNA, 19 nt, Artificial Sequence
  Description of Artificial Sequence: Synthetic oligonucleotide
auccaguccauuacugcaa

SEQ ID NO: 152845 - RNA, 19 nt, Artificial Sequence
  Description of Artificial Sequence: Synthetic oligonucleotide
aaauacuguccacauugac

SEQ ID NO: 152846 - RNA, 19 nt, Artificial Sequence
  Description of Artificial Sequence: Synthetic oligonucleotide
ccucagugcucuaaaucca

SEQ ID NO: 152847 - RNA, 19 nt, Artificial Sequence
  Description of Artificial Sequence: Synthetic oligonucleotide
agagcugguccaggcagug

SEQ ID NO: 152848 - RNA, 19 nt, Artificial Sequence
  Description of Artificial Sequence: Synthetic oligonucleotide
gcagcauguagugauuggg

SEQ ID NO: 152849 - RNA, 19 nt, Artificial Sequence
  Description of Artificial Sequence: Synthetic oligonucleotide
gcccaguagccugauugug

SEQ ID NO: 152850 - RNA, 19 nt, Artificial Sequence
  Description of Artificial Sequence: Synthetic oligonucleotide
gcauuucaaugaagucaua

SEQ ID NO: 152851 - RNA, 19 nt, Artificial Sequence
  Description of Artificial Sequence: Synthetic oligonucleotide
aggaagagggcauuuuggu

SEQ ID NO: 152852 - RNA, 19 nt, Artificial Sequence
  Description of Artificial Sequence: Synthetic oligonucleotide
uuguguauaucaugggacu

SEQ ID NO: 152853 - RNA, 19 nt, Artificial Sequence
  Description of Artificial Sequence: Synthetic oligonucleotide
uuuguuggacaaugauggc

SEQ ID NO: 152854 - RNA, 19 nt, Artificial Sequence
  Description of Artificial Sequence: Synthetic oligonucleotide
caagaaaauucacugugcu

SEQ ID NO: 152855 - RNA, 19 nt, Artificial Sequence
  Description of Artificial Sequence: Synthetic oligonucleotide
ugugaaauccuugaacaga

SEQ ID NO: 152856 - RNA, 19 nt, Artificial Sequence
  Description of Artificial Sequence: Synthetic oligonucleotide
aaucacugacauaggagaa

SEQ ID NO: 152857 - RNA, 19 nt, Artificial Sequence
  Description of Artificial Sequence: Synthetic oligonucleotide
aguuucccaauuucugacc

SEQ ID NO: 152858 - RNA, 19 nt, Artificial Sequence
  Description of Artificial Sequence: Synthetic oligonucleotide
cgagggaaucaucaugaaa

SEQ ID NO: 152859 - RNA, 19 nt, Artificial Sequence
  Description of Artificial Sequence: Synthetic oligonucleotide
agauuuuagucaucccaau

SEQ ID NO: 152860 - RNA, 19 nt, Artificial Sequence
  Description of Artificial Sequence: Synthetic oligonucleotide
uguccucucgcuccuggga

SEQ ID NO: 152861 - RNA, 19 nt, Artificial Sequence
  Description of Artificial Sequence: Synthetic oligonucleotide
aaucugccugcgaagugaa

SEQ ID NO: 152862 - RNA, 19 nt, Artificial Sequence
  Description of Artificial Sequence: Synthetic oligonucleotide
agggucuccgcuggugguc

SEQ ID NO: 152863 - RNA, 19 nt, Artificial Sequence
  Description of Artificial Sequence: Synthetic oligonucleotide
ccuaccauacaugaaacau

SEQ ID NO: 152864 - RNA, 19 nt, Artificial Sequence
  Description of Artificial Sequence: Synthetic oligonucleotide
uggagaucuucgaaauuuc

SEQ ID NO: 152865 - RNA, 19 nt, Artificial Sequence
  Description of Artificial Sequence: Synthetic oligonucleotide
cauucgaaaugagacucau

SEQ ID NO: 152866 - RNA, 19 nt, Artificial Sequence
  Description of Artificial Sequence: Synthetic oligonucleotide
uaauccaacuguaaaagau

SEQ ID NO: 152867 - RNA, 19 nt, Artificial Sequence
  Description of Artificial Sequence: Synthetic oligonucleotide
ucuuauuggcuuuggucuu

SEQ ID NO: 152868 - RNA, 19 nt, Artificial Sequence
  Description of Artificial Sequence: Synthetic oligonucleotide
ucaaguagccaaaggcaug

SEQ ID NO: 152869 - RNA, 19 nt, Artificial Sequence
  Description of Artificial Sequence: Synthetic oligonucleotide
gaaauaucuugcaagcaaa

SEQ ID NO: 152870 - RNA, 19 nt, Artificial Sequence
  Description of Artificial Sequence: Synthetic oligonucleotide
aaaguuuguccacagagac

SEQ ID NO: 152871 - RNA, 19 nt, Artificial Sequence
  Description of Artificial Sequence: Synthetic oligonucleotide
cuuggcugcaagaaacugu

SEQ ID NO: 152872 - RNA, 19 nt, Artificial Sequence
  Description of Artificial Sequence: Synthetic oligonucleotide
uaugcuggaugaaaaauuc

SEQ ID NO: 152873 - RNA, 19 nt, Artificial Sequence
  Description of Artificial Sequence: Synthetic oligonucleotide
cacagucaagguugcugau

SEQ ID NO: 152874 - RNA, 19 nt, Artificial Sequence
  Description of Artificial Sequence: Synthetic oligonucleotide
uuuuggucuugccagagac

SEQ ID NO: 152875 - RNA, 19 nt, Artificial Sequence
  Description of Artificial Sequence: Synthetic oligonucleotide
cauguaugauaaagaauac

SEQ ID NO: 152876 - RNA, 19 nt, Artificial Sequence
  Description of Artificial Sequence: Synthetic oligonucleotide
cuauaguguacacaacaaa

SEQ ID NO: 152877 - RNA, 19 nt, Artificial Sequence
  Description of Artificial Sequence: Synthetic oligonucleotide
aacaggugcaaagcugcca

SEQ ID NO: 152878 - RNA, 19 nt, Artificial Sequence
  Description of Artificial Sequence: Synthetic oligonucleotide
agugaaguggauggcuuug

SEQ ID NO: 152879 - RNA, 19 nt, Artificial Sequence
  Description of Artificial Sequence: Synthetic oligonucleotide
ggaaagucugcaaacucaa

SEQ ID NO: 152880 - RNA, 19 nt, Artificial Sequence
  Description of Artificial Sequence: Synthetic oligonucleotide
aaaguuuaccaccaaguca

SEQ ID NO: 152881 - RNA, 19 nt, Artificial Sequence
  Description of Artificial Sequence: Synthetic oligonucleotide
agaugugugguccuuuggc

SEQ ID NO: 152882 - RNA, 19 nt, Artificial Sequence
  Description of Artificial Sequence: Synthetic oligonucleotide
cgugcuccucugggagcug

SEQ ID NO: 152883 - RNA, 19 nt, Artificial Sequence
  Description of Artificial Sequence: Synthetic oligonucleotide
gaugacaagaggagcccca

SEQ ID NO: 152884 - RNA, 19 nt, Artificial Sequence
  Description of Artificial Sequence: Synthetic oligonucleotide
accuuauccugacguaaac

SEQ ID NO: 152885 - RNA, 19 nt, Artificial Sequence
  Description of Artificial Sequence: Synthetic oligonucleotide
caccuuugauauaacuguu

SEQ ID NO: 152886 - RNA, 19 nt, Artificial Sequence
  Description of Artificial Sequence: Synthetic oligonucleotide
uuacuuguugcaagggaga

SEQ ID NO: 152887 - RNA, 19 nt, Artificial Sequence
  Description of Artificial Sequence: Synthetic oligonucleotide
aagacuccuacaacccgaa

SEQ ID NO: 152888 - RNA, 19 nt, Artificial Sequence
  Description of Artificial Sequence: Synthetic oligonucleotide
auacugcccagaccccuua

SEQ ID NO: 152889 - RNA, 19 nt, Artificial Sequence
  Description of Artificial Sequence: Synthetic oligonucleotide
auaugaaguaaugcuaaaa

SEQ ID NO: 152890 - RNA, 19 nt, Artificial Sequence
  Description of Artificial Sequence: Synthetic oligonucleotide
augcuggcacccuaaagcc

SEQ ID NO: 152891 - RNA, 19 nt, Artificial Sequence
  Description of Artificial Sequence: Synthetic oligonucleotide
cgaaaugcgcccauccuuu

SEQ ID NO: 152892 - RNA, 19 nt, Artificial Sequence
  Description of Artificial Sequence: Synthetic oligonucleotide
uucugaacuggugucccgg

SEQ ID NO: 152893 - RNA, 19 nt, Artificial Sequence
  Description of Artificial Sequence: Synthetic oligonucleotide
gauaucagcgaucuucucu

SEQ ID NO: 152894 - RNA, 19 nt, Artificial Sequence
  Description of Artificial Sequence: Synthetic oligonucleotide
uacuuucauuggggagcac

SEQ ID NO: 152895 - RNA, 19 nt, Artificial Sequence
  Description of Artificial Sequence: Synthetic oligonucleotide
cuauguccaugugaacgcu

SEQ ID NO: 152896 - RNA, 19 nt, Artificial Sequence
  Description of Artificial Sequence: Synthetic oligonucleotide
uacuuaugugaacguaaaa

SEQ ID NO: 152897 - RNA, 19 nt, Artificial Sequence
  Description of Artificial Sequence: Synthetic oligonucleotide
augugucgcuccguauccu

SEQ ID NO: 152898 - RNA, 19 nt, Artificial Sequence
  Description of Artificial Sequence: Synthetic oligonucleotide
uucucuguugucaucagaa

SEQ ID NO: 152899 - RNA, 19 nt, Artificial Sequence
  Description of Artificial Sequence: Synthetic oligonucleotide
agauaacgcugaugaugag

SEQ ID NO: 152900 - RNA, 19 nt, Artificial Sequence
  Description of Artificial Sequence: Synthetic oligonucleotide
gguggacacacgaccagcc

SEQ ID NO: 152901 - RNA, 19 nt, Artificial Sequence
  Description of Artificial Sequence: Synthetic oligonucleotide
cuccuucugggagacauca

SEQ ID NO: 152902 - RNA, 19 nt, Artificial Sequence
  Description of Artificial Sequence: Synthetic oligonucleotide
auagugcuaguacuauguc

SEQ ID NO: 152903 - RNA, 19 nt, Artificial Sequence
  Description of Artificial Sequence: Synthetic oligonucleotide
caaagcaacaguccacacu

SEQ ID NO: 152904 - RNA, 19 nt, Artificial Sequence
  Description of Artificial Sequence: Synthetic oligonucleotide
uuuguccaaugguuuuuuc

SEQ ID NO: 152905 - RNA, 19 nt, Artificial Sequence
  Description of Artificial Sequence: Synthetic oligonucleotide
cacugccugaccuuuaaaa

SEQ ID NO: 152906 - RNA, 19 nt, Artificial Sequence
  Description of Artificial Sequence: Synthetic oligonucleotide
aggccaucgauauucuuug

SEQ ID NO: 152907 - RNA, 19 nt, Artificial Sequence
  Description of Artificial Sequence: Synthetic oligonucleotide
gcucuugccaaaauugcac

SEQ ID NO: 152908 - RNA, 19 nt, Artificial Sequence
  Description of Artificial Sequence: Synthetic oligonucleotide
cuauuauaggacuuguauu

SEQ ID NO: 152909 - RNA, 19 nt, Artificial Sequence
  Description of Artificial Sequence: Synthetic oligonucleotide
uguuauuuaaauuacugga

SEQ ID NO: 152910 - RNA, 19 nt, Artificial Sequence
  Description of Artificial Sequence: Synthetic oligonucleotide
auucuaaggaauuucuuau

SEQ ID NO: 152911 - RNA, 19 nt, Artificial Sequence
  Description of Artificial Sequence: Synthetic oligonucleotide
ucugacagagcaucagaac

SEQ ID NO: 152912 - RNA, 19 nt, Artificial Sequence
  Description of Artificial Sequence: Synthetic oligonucleotide
ccagaggcuuggucccaca

SEQ ID NO: 152913 - RNA, 19 nt, Artificial Sequence
  Description of Artificial Sequence: Synthetic oligonucleotide
aggccacggaccaauggcc

SEQ ID NO: 152914 - RNA, 19 nt, Artificial Sequence
  Description of Artificial Sequence: Synthetic oligonucleotide
cugcagccgugacaacacu

SEQ ID NO: 152915 - RNA, 19 nt, Artificial Sequence
  Description of Artificial Sequence: Synthetic oligonucleotide
uccugucauauuggagucc

SEQ ID NO: 152916 - RNA, 19 nt, Artificial Sequence
  Description of Artificial Sequence: Synthetic oligonucleotide
caaaacuugaauucugggu

SEQ ID NO: 152917 - RNA, 19 nt, Artificial Sequence
  Description of Artificial Sequence: Synthetic oligonucleotide
uugaauuuuuuaaaaauca

SEQ ID NO: 152918 - RNA, 19 nt, Artificial Sequence
  Description of Artificial Sequence: Synthetic oligonucleotide
agguaccacuugauuucau

SEQ ID NO: 152919 - RNA, 19 nt, Artificial Sequence
  Description of Artificial Sequence: Synthetic oligonucleotide
uaugggaaauugaagcagg

SEQ ID NO: 152920 - RNA, 19 nt, Artificial Sequence
  Description of Artificial Sequence: Synthetic oligonucleotide
gaaauauugagggcuucuu

SEQ ID NO: 152921 - RNA, 19 nt, Artificial Sequence
  Description of Artificial Sequence: Synthetic oligonucleotide
ugaucacagaaaacucaga

SEQ ID NO: 152922 - RNA, 19 nt, Artificial Sequence
  Description of Artificial Sequence: Synthetic oligonucleotide
aagagauaguaaugcucag

SEQ ID NO: 152923 - RNA, 19 nt, Artificial Sequence
  Description of Artificial Sequence: Synthetic oligonucleotide
ggacaggagcggcagcccc

SEQ ID NO: 152924 - RNA, 19 nt, Artificial Sequence
  Description of Artificial Sequence: Synthetic oligonucleotide
cagaacaggccacucauuu

SEQ ID NO: 152925 - RNA, 19 nt, Artificial Sequence
  Description of Artificial Sequence: Synthetic oligonucleotide
uagaauucuaguguuucaa

SEQ ID NO: 152926 - RNA, 19 nt, Artificial Sequence
  Description of Artificial Sequence: Synthetic oligonucleotide
aaacacuuuuguguguugu

SEQ ID NO: 152927 - RNA, 19 nt, Artificial Sequence
  Description of Artificial Sequence: Synthetic oligonucleotide
uauggucaauaacauuuuu

SEQ ID NO: 152928 - RNA, 19 nt, Artificial Sequence
  Description of Artificial Sequence: Synthetic oligonucleotide
ucauuacugauggugucau

SEQ ID NO: 152929 - RNA, 19 nt, Artificial Sequence
  Description of Artificial Sequence: Synthetic oligonucleotide
uucacccauuagguaaaca

SEQ ID NO: 152930 - RNA, 19 nt, Artificial Sequence
  Description of Artificial Sequence: Synthetic oligonucleotide
auucccuuuuaaauguuug

SEQ ID NO: 152931 - RNA, 19 nt, Artificial Sequence
  Description of Artificial Sequence: Synthetic oligonucleotide
guuuguuuuuugagacagg

SEQ ID NO: 152932 - RNA, 19 nt, Artificial Sequence
  Description of Artificial Sequence: Synthetic oligonucleotide
gaucucacucuguugccag

SEQ ID NO: 152933 - RNA, 19 nt, Artificial Sequence
  Description of Artificial Sequence: Synthetic oligonucleotide
gggcuguagugcaguggug

SEQ ID NO: 152934 - RNA, 19 nt, Artificial Sequence
  Description of Artificial Sequence: Synthetic oligonucleotide
gugaucauagcucacugca

SEQ ID NO: 152935 - RNA, 19 nt, Artificial Sequence
  Description of Artificial Sequence: Synthetic oligonucleotide
aaccuccaccucccaggcu

SEQ ID NO: 152936 - RNA, 19 nt, Artificial Sequence
  Description of Artificial Sequence: Synthetic oligonucleotide
ucaagccucccgaauagcu

SEQ ID NO: 152937 - RNA, 19 nt, Artificial Sequence
  Description of Artificial Sequence: Synthetic oligonucleotide
ugggacuacaggcgcacac

SEQ ID NO: 152938 - RNA, 19 nt, Artificial Sequence
  Description of Artificial Sequence: Synthetic oligonucleotide
ccaccauccccggcuaauu

SEQ ID NO: 152939 - RNA, 19 nt, Artificial Sequence
  Description of Artificial Sequence: Synthetic oligonucleotide
uuuuguauuuuuuguagag

SEQ ID NO: 152940 - RNA, 19 nt, Artificial Sequence
  Description of Artificial Sequence: Synthetic oligonucleotide
gacgggguuuugccauguu

SEQ ID NO: 152941 - RNA, 19 nt, Artificial Sequence
  Description of Artificial Sequence: Synthetic oligonucleotide
ugccaaggcugguuucaaa

SEQ ID NO: 152942 - RNA, 19 nt, Artificial Sequence
  Description of Artificial Sequence: Synthetic oligonucleotide
acuccuggacucaagaaau

SEQ ID NO: 152943 - RNA, 19 nt, Artificial Sequence
  Description of Artificial Sequence: Synthetic oligonucleotide
uccacccaccucagccucc

SEQ ID NO: 152944 - RNA, 19 nt, Artificial Sequence
  Description of Artificial Sequence: Synthetic oligonucleotide
ccaaagugcuaggauuaca

SEQ ID NO: 152945 - RNA, 19 nt, Artificial Sequence
  Description of Artificial Sequence: Synthetic oligonucleotide
aggcaugagccacugcgcc

SEQ ID NO: 152946 - RNA, 19 nt, Artificial Sequence
  Description of Artificial Sequence: Synthetic oligonucleotide
ccagcccuuauaaauuuuu

SEQ ID NO: 152947 - RNA, 19 nt, Artificial Sequence
  Description of Artificial Sequence: Synthetic oligonucleotide
uguauagacauuccuuugg

SEQ ID NO: 152948 - RNA, 19 nt, Artificial Sequence
  Description of Artificial Sequence: Synthetic oligonucleotide
guuggaagaauauuuauag

SEQ ID NO: 152949 - RNA, 19 nt, Artificial Sequence
  Description of Artificial Sequence: Synthetic oligonucleotide
ggcaauacagucaaaguuu

SEQ ID NO: 152950 - RNA, 19 nt, Artificial Sequence
  Description of Artificial Sequence: Synthetic oligonucleotide
ucaaaauagcaucacacaa

SEQ ID NO: 152951 - RNA, 19 nt, Artificial Sequence
  Description of Artificial Sequence: Synthetic oligonucleotide
aaacauguuuauaaaugaa

SEQ ID NO: 152952 - RNA, 19 nt, Artificial Sequence
  Description of Artificial Sequence: Synthetic oligonucleotide
acaggauguaauguacaua

SEQ ID NO: 152953 - RNA, 19 nt, Artificial Sequence
  Description of Artificial Sequence: Synthetic oligonucleotide
agaugacauuaagaaaauu

SEQ ID NO: 152954 - RNA, 19 nt, Artificial Sequence
  Description of Artificial Sequence: Synthetic oligonucleotide
uuguaugaaauaauuuagu

SEQ ID NO: 152955 - RNA, 19 nt, Artificial Sequence
  Description of Artificial Sequence: Synthetic oligonucleotide
ucaucaugaaauauuuagu

SEQ ID NO: 152956 - RNA, 19 nt, Artificial Sequence
  Description of Artificial Sequence: Synthetic oligonucleotide
uugucauauaaaaacccac

SEQ ID NO: 152957 - RNA, 19 nt, Artificial Sequence
  Description of Artificial Sequence: Synthetic oligonucleotide
cuguuugagaaugaugcua

SEQ ID NO: 152958 - RNA, 19 nt, Artificial Sequence
  Description of Artificial Sequence: Synthetic oligonucleotide
acucugaucuaaugaaugu

SEQ ID NO: 152959 - RNA, 19 nt, Artificial Sequence
  Description of Artificial Sequence: Synthetic oligonucleotide
ugaacauguagauguuuug

SEQ ID NO: 152960 - RNA, 19 nt, Artificial Sequence
  Description of Artificial Sequence: Synthetic oligonucleotide
guguguauuuuuuuaaaug

SEQ ID NO: 152961 - RNA, 19 nt, Artificial Sequence
  Description of Artificial Sequence: Synthetic oligonucleotide
gaaaacucaaaauaagaca

SEQ ID NO: 152962 - RNA, 19 nt, Artificial Sequence
  Description of Artificial Sequence: Synthetic oligonucleotide
aaguaauuuguugauaaau

SEQ ID NO: 152963 - RNA, 19 nt, Artificial Sequence
  Description of Artificial Sequence: Synthetic oligonucleotide
uauuuuuaaagauaacuca

SEQ ID NO: 152964 - RNA, 19 nt, Artificial Sequence
  Description of Artificial Sequence: Synthetic oligonucleotide
agcauguuuguaaagcagg

SEQ ID NO: 152965 - RNA, 19 nt, Artificial Sequence
  Description of Artificial Sequence: Synthetic oligonucleotide
gauacauuuuacuaaaagg

SEQ ID NO: 152966 - RNA, 19 nt, Artificial Sequence
  Description of Artificial Sequence: Synthetic oligonucleotide
guucauugguuccaaucac

SEQ ID NO: 152967 - RNA, 19 nt, Artificial Sequence
  Description of Artificial Sequence: Synthetic oligonucleotide
cagcucauagguagagcaa

SEQ ID NO: 152968 - RNA, 19 nt, Artificial Sequence
  Description of Artificial Sequence: Synthetic oligonucleotide
aagaaaggguggauggauu

SEQ ID NO: 152969 - RNA, 19 nt, Artificial Sequence
  Description of Artificial Sequence: Synthetic oligonucleotide
ugaaaagauuagccucugu

SEQ ID NO: 152970 - RNA, 19 nt, Artificial Sequence
  Description of Artificial Sequence: Synthetic oligonucleotide
ucucgguggcagguuccca

SEQ ID NO: 152971 - RNA, 19 nt, Artificial Sequence
  Description of Artificial Sequence: Synthetic oligonucleotide
accucgcaagcaauuggaa

SEQ ID NO: 152972 - RNA, 19 nt, Artificial Sequence
  Description of Artificial Sequence: Synthetic oligonucleotide
aacaaaacuuuuggggagu

SEQ ID NO: 152973 - RNA, 19 nt, Artificial Sequence
  Description of Artificial Sequence: Synthetic oligonucleotide
uuuuauuuugcauuagggu

SEQ ID NO: 152974 - RNA, 19 nt, Artificial Sequence
  Description of Artificial Sequence: Synthetic oligonucleotide
uguguuuuauguuaagcaa

SEQ ID NO: 152975 - RNA, 19 nt, Artificial Sequence
  Description of Artificial Sequence: Synthetic oligonucleotide
aaacauacuuuagaaacaa

SEQ ID NO: 152976 - RNA, 19 nt, Artificial Sequence
  Description of Artificial Sequence: Synthetic oligonucleotide
aaugaaaaaggcaauugaa

SEQ ID NO: 152977 - RNA, 19 nt, Artificial Sequence
  Description of Artificial Sequence: Synthetic oligonucleotide
aaaucccagcuauuucacc

SEQ ID NO: 152978 - RNA, 19 nt, Artificial Sequence
  Description of Artificial Sequence: Synthetic oligonucleotide
cuagauggaauagccaccc

SEQ ID NO: 152979 - RNA, 19 nt, Artificial Sequence
  Description of Artificial Sequence: Synthetic oligonucleotide
cugagcagaacuuugugau

SEQ ID NO: 152980 - RNA, 19 nt, Artificial Sequence
  Description of Artificial Sequence: Synthetic oligonucleotide
ugcuucauucuguggaauu

SEQ ID NO: 152981 - RNA, 19 nt, Artificial Sequence
  Description of Artificial Sequence: Synthetic oligonucleotide
uuugugcuugcuacuguau

SEQ ID NO: 152982 - RNA, 19 nt, Artificial Sequence
  Description of Artificial Sequence: Synthetic oligonucleotide
uagugcaugugguguaggu

SEQ ID NO: 152983 - RNA, 19 nt, Artificial Sequence
  Description of Artificial Sequence: Synthetic oligonucleotide
uuacucuaacugguuuugu

SEQ ID NO: 152984 - RNA, 19 nt, Artificial Sequence
  Description of Artificial Sequence: Synthetic oligonucleotide
ucgacguaaacauuuaaag

SEQ ID NO: 152985 - RNA, 19 nt, Artificial Sequence
  Description of Artificial Sequence: Synthetic oligonucleotide
guguuauauuuuuuauaaa

SEQ ID NO: 152986 - RNA, 19 nt, Artificial Sequence
  Description of Artificial Sequence: Synthetic oligonucleotide
aaauguuuauuuuuaauga

SEQ ID NO: 152987 - RNA, 19 nt, Artificial Sequence
  Description of Artificial Sequence: Synthetic oligonucleotide
auaugagaaaaauuuuguu

SEQ ID NO: 152988 - RNA, 19 nt, Artificial Sequence
  Description of Artificial Sequence: Synthetic oligonucleotide
uaggccacaaaaacacugc

SEQ ID NO: 152989 - RNA, 19 nt, Artificial Sequence
  Description of Artificial Sequence: Synthetic oligonucleotide
cacugugaacauuuuagaa

SEQ ID NO: 152990 - RNA, 19 nt, Artificial Sequence
  Description of Artificial Sequence: Synthetic oligonucleotide
aaagguaugucagacuggg

SEQ ID NO: 152991 - RNA, 19 nt, Artificial Sequence
  Description of Artificial Sequence: Synthetic oligonucleotide
gauuaaugacagcaugauu

SEQ ID NO: 152992 - RNA, 19 nt, Artificial Sequence
  Description of Artificial Sequence: Synthetic oligonucleotide
uuucaaugacuguaaauug

SEQ ID NO: 152993 - RNA, 19 nt, Artificial Sequence
  Description of Artificial Sequence: Synthetic oligonucleotide
gcgauaaggaaauguacug

SEQ ID NO: 152994 - RNA, 19 nt, Artificial Sequence
  Description of Artificial Sequence: Synthetic oligonucleotide
gauugccaauacaccccac

SEQ ID NO: 152995 - RNA, 19 nt, Artificial Sequence
  Description of Artificial Sequence: Synthetic oligonucleotide
cccucauuacaucaucagg

SEQ ID NO: 152996 - RNA, 19 nt, Artificial Sequence
  Description of Artificial Sequence: Synthetic oligonucleotide
gacuugaagccaaggguua

SEQ ID NO: 152997 - RNA, 19 nt, Artificial Sequence
  Description of Artificial Sequence: Synthetic oligonucleotide
aacccagcaagcuacaaag

SEQ ID NO: 152998 - RNA, 19 nt, Artificial Sequence
  Description of Artificial Sequence: Synthetic oligonucleotide
gagggugugucacacugaa

SEQ ID NO: 152999 - RNA, 19 nt, Artificial Sequence
  Description of Artificial Sequence: Synthetic oligonucleotide
aacucaauaguugaguuug

SEQ ID NO: 153000 - RNA, 19 nt, Artificial Sequence
  Description of Artificial Sequence: Synthetic oligonucleotide
ggcuguuguugcaggaaaa

SEQ ID NO: 153001 - RNA, 19 nt, Artificial Sequence
  Description of Artificial Sequence: Synthetic oligonucleotide
augauuauaacuaaaagcu

SEQ ID NO: 153002 - RNA, 19 nt, Artificial Sequence
  Description of Artificial Sequence: Synthetic oligonucleotide
ucucugauagugcagagac

SEQ ID NO: 153003 - RNA, 19 nt, Artificial Sequence
  Description of Artificial Sequence: Synthetic oligonucleotide
cuuaccagaagacacaagg

SEQ ID NO: 153004 - RNA, 19 nt, Artificial Sequence
  Description of Artificial Sequence: Synthetic oligonucleotide
gaauuguacugaagagcua

SEQ ID NO: 153005 - RNA, 19 nt, Artificial Sequence
  Description of Artificial Sequence: Synthetic oligonucleotide
auuacaauccaaauauugc

SEQ ID NO: 153006 - RNA, 19 nt, Artificial Sequence
  Description of Artificial Sequence: Synthetic oligonucleotide
ccguuucauaaauguaaua

SEQ ID NO: 153007 - RNA, 19 nt, Artificial Sequence
  Description of Artificial Sequence: Synthetic oligonucleotide
aaguaauacuaauucacag

SEQ ID NO: 153008 - RNA, 19 nt, Artificial Sequence
  Description of Artificial Sequence: Synthetic oligonucleotide
gaguauuguaaauggugga

SEQ ID NO: 153009 - RNA, 19 nt, Artificial Sequence
  Description of Artificial Sequence: Synthetic oligonucleotide
augacaaaagaaaaucugc

SEQ ID NO: 153010 - RNA, 19 nt, Artificial Sequence
  Description of Artificial Sequence: Synthetic oligonucleotide
cucuguggaaagaaagaac

SEQ ID NO: 153011 - RNA, 19 nt, Artificial Sequence
  Description of Artificial Sequence: Synthetic oligonucleotide
cugucucuaccagggucaa

SEQ ID NO: 153012 - RNA, 19 nt, Artificial Sequence
  Description of Artificial Sequence: Synthetic oligonucleotide
agagcaugaacgcaucaau

SEQ ID NO: 153013 - RNA, 19 nt, Artificial Sequence
  Description of Artificial Sequence: Synthetic oligonucleotide
uagaaagaacucggggaaa

SEQ ID NO: 153014 - RNA, 19 nt, Artificial Sequence
  Description of Artificial Sequence: Synthetic oligonucleotide
acaucccaucaacaggacu

SEQ ID NO: 153015 - RNA, 19 nt, Artificial Sequence
  Description of Artificial Sequence: Synthetic oligonucleotide
uacacacuuguauauacau

SEQ ID NO: 153016 - RNA, 19 nt, Artificial Sequence
  Description of Artificial Sequence: Synthetic oligonucleotide
uucuugagaacacugcaau

SEQ ID NO: 153017 - RNA, 19 nt, Artificial Sequence
  Description of Artificial Sequence: Synthetic oligonucleotide
ugugaaaaucacguuugcu

SEQ ID NO: 153018 - RNA, 19 nt, Artificial Sequence
  Description of Artificial Sequence: Synthetic oligonucleotide
uauuuauaaacuuguccuu

SEQ ID NO: 153019 - RNA, 19 nt, Artificial Sequence
  Description of Artificial Sequence: Synthetic oligonucleotide
uagauuaaugugucuggac

SEQ ID NO: 153020 - RNA, 19 nt, Artificial Sequence
  Description of Artificial Sequence: Synthetic oligonucleotide
cagauugugggaguaagug

SEQ ID NO: 153021 - RNA, 19 nt, Artificial Sequence
  Description of Artificial Sequence: Synthetic oligonucleotide
gauucuucuaagaauuaga

SEQ ID NO: 153022 - RNA, 19 nt, Artificial Sequence
  Description of Artificial Sequence: Synthetic oligonucleotide
auacuugucacugccuaua

SEQ ID NO: 153023 - RNA, 19 nt, Artificial Sequence
  Description of Artificial Sequence: Synthetic oligonucleotide
accugcagcugaacugaau

SEQ ID NO: 153024 - RNA, 19 nt, Artificial Sequence
  Description of Artificial Sequence: Synthetic oligonucleotide
ugguacuucguauguuaau

SEQ ID NO: 153025 - RNA, 19 nt, Artificial Sequence
  Description of Artificial Sequence: Synthetic oligonucleotide
uaguuguucugauaaauca

SEQ ID NO: 153026 - RNA, 19 nt, Artificial Sequence
  Description of Artificial Sequence: Synthetic oligonucleotide
augcaauuaaaguaaagug

SEQ ID NO: 153027 - RNA, 19 nt, Artificial Sequence
  Description of Artificial Sequence: Synthetic oligonucleotide
gaugcaacaucuuguaaaa

SEQ ID NO: 153028 - RNA, 25 nt, Artificial Sequence
  Description of Artificial Sequence: Synthetic oligonucleotide
gcccucgccgcccgcggcgccccga

SEQ ID NO: 153029 - RNA, 25 nt, Artificial Sequence
  Description of Artificial Sequence: Synthetic oligonucleotide
agcgcuuugugagcagaugcggagc

SEQ ID NO: 153030 - RNA, 25 nt, Artificial Sequence
  Description of Artificial Sequence: Synthetic oligonucleotide
ccgaguggagggcgcgagccagaug

SEQ ID NO: 153031 - RNA, 25 nt, Artificial Sequence
  Description of Artificial Sequence: Synthetic oligonucleotide
gcggggcgacagcugacuugcugag

SEQ ID NO: 153032 - RNA, 25 nt, Artificial Sequence
  Description of Artificial Sequence: Synthetic oligonucleotide
gaggaggcggggaggcgcggagcgc

SEQ ID NO: 153033 - RNA, 25 nt, Artificial Sequence
  Description of Artificial Sequence: Synthetic oligonucleotide
cgcgugugguccuugcgccgcugac

SEQ ID NO: 153034 - RNA, 25 nt, Artificial Sequence
  Description of Artificial Sequence: Synthetic oligonucleotide
cuucuccacugguuccugggcaccg

SEQ ID NO: 153035 - RNA, 25 nt, Artificial Sequence
  Description of Artificial Sequence: Synthetic oligonucleotide
gaaagauaaaccucucauaaugaag

SEQ ID NO: 153036 - RNA, 25 nt, Artificial Sequence
  Description of Artificial Sequence: Synthetic oligonucleotide
ggcccccgcugugcuugcaccuggc

SEQ ID NO: 153037 - RNA, 25 nt, Artificial Sequence
  Description of Artificial Sequence: Synthetic oligonucleotide
cauccucgugcuccuguuuaccuug

SEQ ID NO: 153038 - RNA, 25 nt, Artificial Sequence
  Description of Artificial Sequence: Synthetic oligonucleotide
ggugcagaggagcaauggggagugu

SEQ ID NO: 153039 - RNA, 25 nt, Artificial Sequence
  Description of Artificial Sequence: Synthetic oligonucleotide
uaaagaggcacuagcaaaguccgag

SEQ ID NO: 153040 - RNA, 25 nt, Artificial Sequence
  Description of Artificial Sequence: Synthetic oligonucleotide
gaugaaugugaauaugaaguaucag

SEQ ID NO: 153041 - RNA, 25 nt, Artificial Sequence
  Description of Artificial Sequence: Synthetic oligonucleotide
gcuucccaacuucaccgcggaaaca

SEQ ID NO: 153042 - RNA, 25 nt, Artificial Sequence
  Description of Artificial Sequence: Synthetic oligonucleotide
acccauccagaaugucauucuacau

SEQ ID NO: 153043 - RNA, 25 nt, Artificial Sequence
  Description of Artificial Sequence: Synthetic oligonucleotide
ugagcaucacauuuuccuuggugcc

SEQ ID NO: 153044 - RNA, 25 nt, Artificial Sequence
  Description of Artificial Sequence: Synthetic oligonucleotide
cacuaacuacauuuauguuuuaaau

SEQ ID NO: 153045 - RNA, 25 nt, Artificial Sequence
  Description of Artificial Sequence: Synthetic oligonucleotide
ugaggaagaccuucagaagguugcu

SEQ ID NO: 153046 - RNA, 25 nt, Artificial Sequence
  Description of Artificial Sequence: Synthetic oligonucleotide
ugaguacaagacugggccugugcug

SEQ ID NO: 153047 - RNA, 25 nt, Artificial Sequence
  Description of Artificial Sequence: Synthetic oligonucleotide
ggaacacccagauuguuucccaugu

SEQ ID NO: 153048 - RNA, 25 nt, Artificial Sequence
  Description of Artificial Sequence: Synthetic oligonucleotide
ucaggacugcagcagcaaagccaau

SEQ ID NO: 153049 - RNA, 25 nt, Artificial Sequence
  Description of Artificial Sequence: Synthetic oligonucleotide
uuuaucaggagguguuuggaaagau

SEQ ID NO: 153050 - RNA, 25 nt, Artificial Sequence
  Description of Artificial Sequence: Synthetic oligonucleotide
uaacaucaacauggcucuaguuguc

SEQ ID NO: 153051 - RNA, 25 nt, Artificial Sequence
  Description of Artificial Sequence: Synthetic oligonucleotide
cgacaccuacuaugaugaucaacuc

SEQ ID NO: 153052 - RNA, 25 nt, Artificial Sequence
  Description of Artificial Sequence: Synthetic oligonucleotide
cauuagcuguggcagcgucaacaga

SEQ ID NO: 153053 - RNA, 25 nt, Artificial Sequence
  Description of Artificial Sequence: Synthetic oligonucleotide
agggaccugccagcgacaugucuuu

SEQ ID NO: 153054 - RNA, 25 nt, Artificial Sequence
  Description of Artificial Sequence: Synthetic oligonucleotide
uccccacaaucauacugcugacaua

SEQ ID NO: 153055 - RNA, 25 nt, Artificial Sequence
  Description of Artificial Sequence: Synthetic oligonucleotide
acagucggagguucacugcauauuc

SEQ ID NO: 153056 - RNA, 25 nt, Artificial Sequence
  Description of Artificial Sequence: Synthetic oligonucleotide
cuccccacagauagaagagcccagc

SEQ ID NO: 153057 - RNA, 25 nt, Artificial Sequence
  Description of Artificial Sequence: Synthetic oligonucleotide
ccaguguccugacuguguggugagc

SEQ ID NO: 153058 - RNA, 25 nt, Artificial Sequence
  Description of Artificial Sequence: Synthetic oligonucleotide
cgcccugggagccaaaguccuuuca

SEQ ID NO: 153059 - RNA, 25 nt, Artificial Sequence
  Description of Artificial Sequence: Synthetic oligonucleotide
aucuguaaaggaccgguucaucaac

SEQ ID NO: 153060 - RNA, 25 nt, Artificial Sequence
  Description of Artificial Sequence: Synthetic oligonucleotide
cuucuuuguaggcaauaccauaaau

SEQ ID NO: 153061 - RNA, 25 nt, Artificial Sequence
  Description of Artificial Sequence: Synthetic oligonucleotide
uucuucuuauuucccagaucaucca

SEQ ID NO: 153062 - RNA, 25 nt, Artificial Sequence
  Description of Artificial Sequence: Synthetic oligonucleotide
auugcauucgauaucagugagaagg

SEQ ID NO: 153063 - RNA, 25 nt, Artificial Sequence
  Description of Artificial Sequence: Synthetic oligonucleotide
gcuaaaggaaacgaaagaugguuuu

SEQ ID NO: 153064 - RNA, 25 nt, Artificial Sequence
  Description of Artificial Sequence: Synthetic oligonucleotide
uauguuuuugacggaccaguccuac

SEQ ID NO: 153065 - RNA, 25 nt, Artificial Sequence
  Description of Artificial Sequence: Synthetic oligonucleotide
cauugauguuuuaccugaguucaga

SEQ ID NO: 153066 - RNA, 25 nt, Artificial Sequence
  Description of Artificial Sequence: Synthetic oligonucleotide
agauucuuaccccauuaaguauguc

SEQ ID NO: 153067 - RNA, 25 nt, Artificial Sequence
  Description of Artificial Sequence: Synthetic oligonucleotide
ccaugccuuugaaagcaacaauuuu

SEQ ID NO: 153068 - RNA, 25 nt, Artificial Sequence
  Description of Artificial Sequence: Synthetic oligonucleotide
uauuuacuucuugacgguccaaagg

SEQ ID NO: 153069 - RNA, 25 nt, Artificial Sequence
  Description of Artificial Sequence: Synthetic oligonucleotide
ggaaacucuagaugcucagacuuuu

SEQ ID NO: 153070 - RNA, 25 nt, Artificial Sequence
  Description of Artificial Sequence: Synthetic oligonucleotide
ucacacaagaauaaucagguucugu

SEQ ID NO: 153071 - RNA, 25 nt, Artificial Sequence
  Description of Artificial Sequence: Synthetic oligonucleotide
uuccauaaacucuggauugcauucc

SEQ ID NO: 153072 - RNA, 25 nt, Artificial Sequence
  Description of Artificial Sequence: Synthetic oligonucleotide
cuacauggaaaugccucuggagugu

SEQ ID NO: 153073 - RNA, 25 nt, Artificial Sequence
  Description of Artificial Sequence: Synthetic oligonucleotide
uauucucacagaaaagagaaaaaag

SEQ ID NO: 153074 - RNA, 25 nt, Artificial Sequence
  Description of Artificial Sequence: Synthetic oligonucleotide
gagauccacaaagaaggaaguguuu

SEQ ID NO: 153075 - RNA, 25 nt, Artificial Sequence
  Description of Artificial Sequence: Synthetic oligonucleotide
uaauauacuucaggcugcguauguc

SEQ ID NO: 153076 - RNA, 25 nt, Artificial Sequence
  Description of Artificial Sequence: Synthetic oligonucleotide
cagcaagccuggggcccagcuugcu

SEQ ID NO: 153077 - RNA, 25 nt, Artificial Sequence
  Description of Artificial Sequence: Synthetic oligonucleotide
uagacaaauaggagccagccugaau

SEQ ID NO: 153078 - RNA, 25 nt, Artificial Sequence
  Description of Artificial Sequence: Synthetic oligonucleotide
ugaugacauucuuuucgggguguuc

SEQ ID NO: 153079 - RNA, 25 nt, Artificial Sequence
  Description of Artificial Sequence: Synthetic oligonucleotide
cgcacaaagcaagccagauucugcc

SEQ ID NO: 153080 - RNA, 25 nt, Artificial Sequence
  Description of Artificial Sequence: Synthetic oligonucleotide
cgaaccaauggaucgaucugccaug

SEQ ID NO: 153081 - RNA, 25 nt, Artificial Sequence
  Description of Artificial Sequence: Synthetic oligonucleotide
gugugcauucccuaucaaauauguc

SEQ ID NO: 153082 - RNA, 25 nt, Artificial Sequence
  Description of Artificial Sequence: Synthetic oligonucleotide
caacgacuucuucaacaagaucguc

SEQ ID NO: 153083 - RNA, 25 nt, Artificial Sequence
  Description of Artificial Sequence: Synthetic oligonucleotide
caacaaaaacaaugugagaugucuc

SEQ ID NO: 153084 - RNA, 25 nt, Artificial Sequence
  Description of Artificial Sequence: Synthetic oligonucleotide
ccagcauuuuuacggacccaaucau

SEQ ID NO: 153085 - RNA, 25 nt, Artificial Sequence
  Description of Artificial Sequence: Synthetic oligonucleotide
ugagcacugcuuuaauaggacacuu

SEQ ID NO: 153086 - RNA, 25 nt, Artificial Sequence
  Description of Artificial Sequence: Synthetic oligonucleotide
ucugagaaauucaucaggcugugaa

SEQ ID NO: 153087 - RNA, 25 nt, Artificial Sequence
  Description of Artificial Sequence: Synthetic oligonucleotide
agcgcgccgugaugaauaucgaaca

SEQ ID NO: 153088 - RNA, 25 nt, Artificial Sequence
  Description of Artificial Sequence: Synthetic oligonucleotide
agaguuuaccacagcuuugcagcgc

SEQ ID NO: 153089 - RNA, 25 nt, Artificial Sequence
  Description of Artificial Sequence: Synthetic oligonucleotide
cguugacuuauucaugggucaauuc

SEQ ID NO: 153090 - RNA, 25 nt, Artificial Sequence
  Description of Artificial Sequence: Synthetic oligonucleotide
cagcgaaguccucuuaacaucuaua

SEQ ID NO: 153091 - RNA, 25 nt, Artificial Sequence
  Description of Artificial Sequence: Synthetic oligonucleotide
auccaccuucauuaaaggagaccuc

SEQ ID NO: 153092 - RNA, 25 nt, Artificial Sequence
  Description of Artificial Sequence: Synthetic oligonucleotide
caccauagcuaaucuugggacauca

SEQ ID NO: 153093 - RNA, 25 nt, Artificial Sequence
  Description of Artificial Sequence: Synthetic oligonucleotide
agagggucgcuucaugcagguugug

SEQ ID NO: 153094 - RNA, 25 nt, Artificial Sequence
  Description of Artificial Sequence: Synthetic oligonucleotide
gguuucucgaucaggaccaucaacc

SEQ ID NO: 153095 - RNA, 25 nt, Artificial Sequence
  Description of Artificial Sequence: Synthetic oligonucleotide
cccucaugugaauuuucuccuggac

SEQ ID NO: 153096 - RNA, 25 nt, Artificial Sequence
  Description of Artificial Sequence: Synthetic oligonucleotide
cucccauccagugucuccagaagug

SEQ ID NO: 153097 - RNA, 25 nt, Artificial Sequence
  Description of Artificial Sequence: Synthetic oligonucleotide
gauuguggagcauacauuaaaccaa

SEQ ID NO: 153098 - RNA, 25 nt, Artificial Sequence
  Description of Artificial Sequence: Synthetic oligonucleotide
aaauggcuacacacugguuaucacu

SEQ ID NO: 153099 - RNA, 25 nt, Artificial Sequence
  Description of Artificial Sequence: Synthetic oligonucleotide
ugggaagaagaucacgaagauccca

SEQ ID NO: 153100 - RNA, 25 nt, Artificial Sequence
  Description of Artificial Sequence: Synthetic oligonucleotide
auugaauggcuugggcugcagacau

SEQ ID NO: 153101 - RNA, 25 nt, Artificial Sequence
  Description of Artificial Sequence: Synthetic oligonucleotide
uuuccaguccugcagucaaugccuc

SEQ ID NO: 153102 - RNA, 25 nt, Artificial Sequence
  Description of Artificial Sequence: Synthetic oligonucleotide
cucugccccacccuuuguucagugu

SEQ ID NO: 153103 - RNA, 25 nt, Artificial Sequence
  Description of Artificial Sequence: Synthetic oligonucleotide
uggcuggugccacgacaaaugugug

SEQ ID NO: 153104 - RNA, 25 nt, Artificial Sequence
  Description of Artificial Sequence: Synthetic oligonucleotide
gcgaucggaggaaugccugagcggg

SEQ ID NO: 153105 - RNA, 25 nt, Artificial Sequence
  Description of Artificial Sequence: Synthetic oligonucleotide
gacauggacucaacagaucugucug

SEQ ID NO: 153106 - RNA, 25 nt, Artificial Sequence
  Description of Artificial Sequence: Synthetic oligonucleotide
gccugcaaucuacaagguuuuccca

SEQ ID NO: 153107 - RNA, 25 nt, Artificial Sequence
  Description of Artificial Sequence: Synthetic oligonucleotide
aaauagugcaccccuugaaggaggg

SEQ ID NO: 153108 - RNA, 25 nt, Artificial Sequence
  Description of Artificial Sequence: Synthetic oligonucleotide
gacaaggcugaccauauguggcugg

SEQ ID NO: 153109 - RNA, 25 nt, Artificial Sequence
  Description of Artificial Sequence: Synthetic oligonucleotide
ggacuuuggauuucggaggaauaau

SEQ ID NO: 153110 - RNA, 25 nt, Artificial Sequence
  Description of Artificial Sequence: Synthetic oligonucleotide
uaaauuugauuuaaagaaaacuaga

SEQ ID NO: 153111 - RNA, 25 nt, Artificial Sequence
  Description of Artificial Sequence: Synthetic oligonucleotide
aguucuccuuggaaaugagagcugc

SEQ ID NO: 153112 - RNA, 25 nt, Artificial Sequence
  Description of Artificial Sequence: Synthetic oligonucleotide
caccuugacuuuaagugagagcacg

SEQ ID NO: 153113 - RNA, 25 nt, Artificial Sequence
  Description of Artificial Sequence: Synthetic oligonucleotide
gaugaauacauugaaaugcacaguu

SEQ ID NO: 153114 - RNA, 25 nt, Artificial Sequence
  Description of Artificial Sequence: Synthetic oligonucleotide
ugguccugccaugaauaagcauuuc

SEQ ID NO: 153115 - RNA, 25 nt, Artificial Sequence
  Description of Artificial Sequence: Synthetic oligonucleotide
caauauguccauaauuauuucaaau

SEQ ID NO: 153116 - RNA, 25 nt, Artificial Sequence
  Description of Artificial Sequence: Synthetic oligonucleotide
uggccacgggacaacacaauacagu

SEQ ID NO: 153117 - RNA, 25 nt, Artificial Sequence
  Description of Artificial Sequence: Synthetic oligonucleotide
uacauucuccuauguggauccugua

SEQ ID NO: 153118 - RNA, 25 nt, Artificial Sequence
  Description of Artificial Sequence: Synthetic oligonucleotide
aauaacaaguauuucgccgaaauac

SEQ ID NO: 153119 - RNA, 25 nt, Artificial Sequence
  Description of Artificial Sequence: Synthetic oligonucleotide
cgguccuauggcugguggcacuuua

SEQ ID NO: 153120 - RNA, 25 nt, Artificial Sequence
  Description of Artificial Sequence: Synthetic oligonucleotide
acuuacuuuaacuggaaauuaccua

SEQ ID NO: 153121 - RNA, 25 nt, Artificial Sequence
  Description of Artificial Sequence: Synthetic oligonucleotide
aaacagugggaauucuagacacauu

SEQ ID NO: 153122 - RNA, 25 nt, Artificial Sequence
  Description of Artificial Sequence: Synthetic oligonucleotide
uucaauugguggaaaaacauguacu

SEQ ID NO: 153123 - RNA, 25 nt, Artificial Sequence
  Description of Artificial Sequence: Synthetic oligonucleotide
uuuaaaaagugugucaaacaguauu

SEQ ID NO: 153124 - RNA, 25 nt, Artificial Sequence
  Description of Artificial Sequence: Synthetic oligonucleotide
ucuugaauguuauaccccagcccaa

SEQ ID NO: 153125 - RNA, 25 nt, Artificial Sequence
  Description of Artificial Sequence: Synthetic oligonucleotide
aaccauuucaacugaguuugcuguu

SEQ ID NO: 153126 - RNA, 25 nt, Artificial Sequence
  Description of Artificial Sequence: Synthetic oligonucleotide
uaaauugaaaauugacuuagccaac

SEQ ID NO: 153127 - RNA, 25 nt, Artificial Sequence
  Description of Artificial Sequence: Synthetic oligonucleotide
ccgagagacaagcaucuucaguuac

SEQ ID NO: 153128 - RNA, 25 nt, Artificial Sequence
  Description of Artificial Sequence: Synthetic oligonucleotide
ccgugaagaucccauugucuaugaa

SEQ ID NO: 153129 - RNA, 25 nt, Artificial Sequence
  Description of Artificial Sequence: Synthetic oligonucleotide
aauucauccaaccaaaucuuuuauu

SEQ ID NO: 153130 - RNA, 25 nt, Artificial Sequence
  Description of Artificial Sequence: Synthetic oligonucleotide
uaguggugggagcacaauaacaggu

SEQ ID NO: 153131 - RNA, 25 nt, Artificial Sequence
  Description of Artificial Sequence: Synthetic oligonucleotide
uguugggaaaaaccugaauucaguu

SEQ ID NO: 153132 - RNA, 25 nt, Artificial Sequence
  Description of Artificial Sequence: Synthetic oligonucleotide
uagugucccgagaauggucauaaau

SEQ ID NO: 153133 - RNA, 25 nt, Artificial Sequence
  Description of Artificial Sequence: Synthetic oligonucleotide
ugugcaugaagcaggaaggaacuuu

SEQ ID NO: 153134 - RNA, 25 nt, Artificial Sequence
  Description of Artificial Sequence: Synthetic oligonucleotide
uacaguggcaugucaacaucgcucu

SEQ ID NO: 153135 - RNA, 25 nt, Artificial Sequence
  Description of Artificial Sequence: Synthetic oligonucleotide
uaauucagagauaaucuguuguacc

SEQ ID NO: 153136 - RNA, 25 nt, Artificial Sequence
  Description of Artificial Sequence: Synthetic oligonucleotide
cacuccuucccugcaacagcugaau

SEQ ID NO: 153137 - RNA, 25 nt, Artificial Sequence
  Description of Artificial Sequence: Synthetic oligonucleotide
ucugcaacucccccugaaaaccaaa

SEQ ID NO: 153138 - RNA, 25 nt, Artificial Sequence
  Description of Artificial Sequence: Synthetic oligonucleotide
agccuuuuucauguuagaugggauc

SEQ ID NO: 153139 - RNA, 25 nt, Artificial Sequence
  Description of Artificial Sequence: Synthetic oligonucleotide
ccuuuccaaauacuuugaucucauu

SEQ ID NO: 153140 - RNA, 25 nt, Artificial Sequence
  Description of Artificial Sequence: Synthetic oligonucleotide
uuauguacauaauccuguguuuaag

SEQ ID NO: 153141 - RNA, 25 nt, Artificial Sequence
  Description of Artificial Sequence: Synthetic oligonucleotide
gccuuuugaaaagccagugaugauc

SEQ ID NO: 153142 - RNA, 25 nt, Artificial Sequence
  Description of Artificial Sequence: Synthetic oligonucleotide
cucaaugggcaaugaaaauguacug

SEQ ID NO: 153143 - RNA, 25 nt, Artificial Sequence
  Description of Artificial Sequence: Synthetic oligonucleotide
ggaaauuaagggaaaugauauugac

SEQ ID NO: 153144 - RNA, 25 nt, Artificial Sequence
  Description of Artificial Sequence: Synthetic oligonucleotide
cccugaagcaguuaaaggugaagug

SEQ ID NO: 153145 - RNA, 25 nt, Artificial Sequence
  Description of Artificial Sequence: Synthetic oligonucleotide
guuaaaaguuggaaauaagagcugu

SEQ ID NO: 153146 - RNA, 25 nt, Artificial Sequence
  Description of Artificial Sequence: Synthetic oligonucleotide
ugagaauauacacuuacauucugaa

SEQ ID NO: 153147 - RNA, 25 nt, Artificial Sequence
  Description of Artificial Sequence: Synthetic oligonucleotide
agccguuuuaugcacgguccccaau

SEQ ID NO: 153148 - RNA, 25 nt, Artificial Sequence
  Description of Artificial Sequence: Synthetic oligonucleotide
ugaccugcugaaauugaacagcgag

SEQ ID NO: 153149 - RNA, 25 nt, Artificial Sequence
  Description of Artificial Sequence: Synthetic oligonucleotide
gcuaaauauagaguggaagcaagca

SEQ ID NO: 153150 - RNA, 25 nt, Artificial Sequence
  Description of Artificial Sequence: Synthetic oligonucleotide
aauuucuucaaccguccuuggaaaa

SEQ ID NO: 153151 - RNA, 25 nt, Artificial Sequence
  Description of Artificial Sequence: Synthetic oligonucleotide
aguaauaguucaaccagaucagaau

SEQ ID NO: 153152 - RNA, 25 nt, Artificial Sequence
  Description of Artificial Sequence: Synthetic oligonucleotide
uuucacaggauugauugcugguguu

SEQ ID NO: 153153 - RNA, 25 nt, Artificial Sequence
  Description of Artificial Sequence: Synthetic oligonucleotide
ugucucaauaucaacagcacuguua

SEQ ID NO: 153154 - RNA, 25 nt, Artificial Sequence
  Description of Artificial Sequence: Synthetic oligonucleotide
auuacuacuuggguuuuuccugugg

SEQ ID NO: 153155 - RNA, 25 nt, Artificial Sequence
  Description of Artificial Sequence: Synthetic oligonucleotide
gcugaaaaagagaaagcaaauuaaa

SEQ ID NO: 153156 - RNA, 25 nt, Artificial Sequence
  Description of Artificial Sequence: Synthetic oligonucleotide
agaucugggcagugaauuaguucgc

SEQ ID NO: 153157 - RNA, 25 nt, Artificial Sequence
  Description of Artificial Sequence: Synthetic oligonucleotide
cuacgaugcaagaguacacacuccu

SEQ ID NO: 153158 - RNA, 25 nt, Artificial Sequence
  Description of Artificial Sequence: Synthetic oligonucleotide
ucauuuggauaggcuuguaagugcc

SEQ ID NO: 153159 - RNA, 25 nt, Artificial Sequence
  Description of Artificial Sequence: Synthetic oligonucleotide
ccgaaguguaagcccaacuacagaa

SEQ ID NO: 153160 - RNA, 25 nt, Artificial Sequence
  Description of Artificial Sequence: Synthetic oligonucleotide
aaugguuucaaaugaaucuguagac

SEQ ID NO: 153161 - RNA, 25 nt, Artificial Sequence
  Description of Artificial Sequence: Synthetic oligonucleotide
cuaccgagcuacuuuuccagaagau

SEQ ID NO: 153162 - RNA, 25 nt, Artificial Sequence
  Description of Artificial Sequence: Synthetic oligonucleotide
ucaguuuccuaauucaucucagaac

SEQ ID NO: 153163 - RNA, 25 nt, Artificial Sequence
  Description of Artificial Sequence: Synthetic oligonucleotide
cgguucaugccgacaagugcaguau

SEQ ID NO: 153164 - RNA, 25 nt, Artificial Sequence
  Description of Artificial Sequence: Synthetic oligonucleotide
uccucugacagacaugucccccauc

SEQ ID NO: 153165 - RNA, 25 nt, Artificial Sequence
  Description of Artificial Sequence: Synthetic oligonucleotide
ccuaacuaguggggacucugauaua

SEQ ID NO: 153166 - RNA, 25 nt, Artificial Sequence
  Description of Artificial Sequence: Synthetic oligonucleotide
auccaguccauuacugcaaaauacu

SEQ ID NO: 153167 - RNA, 25 nt, Artificial Sequence
  Description of Artificial Sequence: Synthetic oligonucleotide
uguccacauugaccucagugcucua

SEQ ID NO: 153168 - RNA, 25 nt, Artificial Sequence
  Description of Artificial Sequence: Synthetic oligonucleotide
aaauccagagcugguccaggcagug

SEQ ID NO: 153169 - RNA, 25 nt, Artificial Sequence
  Description of Artificial Sequence: Synthetic oligonucleotide
gcagcauguagugauugggcccagu

SEQ ID NO: 153170 - RNA, 25 nt, Artificial Sequence
  Description of Artificial Sequence: Synthetic oligonucleotide
uagccugauugugcauuucaaugaa

SEQ ID NO: 153171 - RNA, 25 nt, Artificial Sequence
  Description of Artificial Sequence: Synthetic oligonucleotide
agucauaggaagagggcauuuuggu

SEQ ID NO: 153172 - RNA, 25 nt, Artificial Sequence
  Description of Artificial Sequence: Synthetic oligonucleotide
uuguguauaucaugggacuuuguug

SEQ ID NO: 153173 - RNA, 25 nt, Artificial Sequence
  Description of Artificial Sequence: Synthetic oligonucleotide
ggacaaugauggcaagaaaauucac

SEQ ID NO: 153174 - RNA, 25 nt, Artificial Sequence
  Description of Artificial Sequence: Synthetic oligonucleotide
cugugcugugaaauccuugaacaga

SEQ ID NO: 153175 - RNA, 25 nt, Artificial Sequence
  Description of Artificial Sequence: Synthetic oligonucleotide
aaucacugacauaggagaaguuucc

SEQ ID NO: 153176 - RNA, 25 nt, Artificial Sequence
  Description of Artificial Sequence: Synthetic oligonucleotide
ccaauuucugaccgagggaaucauc

SEQ ID NO: 153177 - RNA, 25 nt, Artificial Sequence
  Description of Artificial Sequence: Synthetic oligonucleotide
caugaaagauuuuagucaucccaau

SEQ ID NO: 153178 - RNA, 25 nt, Artificial Sequence
  Description of Artificial Sequence: Synthetic oligonucleotide
uguccucucgcuccugggaaucugc

SEQ ID NO: 153179 - RNA, 25 nt, Artificial Sequence
  Description of Artificial Sequence: Synthetic oligonucleotide
ccugcgaagugaagggucuccgcug

SEQ ID NO: 153180 - RNA, 25 nt, Artificial Sequence
  Description of Artificial Sequence: Synthetic oligonucleotide
ggugguccuaccauacaugaaacau

SEQ ID NO: 153181 - RNA, 25 nt, Artificial Sequence
  Description of Artificial Sequence: Synthetic oligonucleotide
uggagaucuucgaaauuucauucga

SEQ ID NO: 153182 - RNA, 25 nt, Artificial Sequence
  Description of Artificial Sequence: Synthetic oligonucleotide
aaaugagacucauaauccaacugua

SEQ ID NO: 153183 - RNA, 25 nt, Artificial Sequence
  Description of Artificial Sequence: Synthetic oligonucleotide
aaaagaucuuauuggcuuuggucuu

SEQ ID NO: 153184 - RNA, 25 nt, Artificial Sequence
  Description of Artificial Sequence: Synthetic oligonucleotide
ucaaguagccaaaggcaugaaauau

SEQ ID NO: 153185 - RNA, 25 nt, Artificial Sequence
  Description of Artificial Sequence: Synthetic oligonucleotide
ucuugcaagcaaaaaguuuguccac

SEQ ID NO: 153186 - RNA, 25 nt, Artificial Sequence
  Description of Artificial Sequence: Synthetic oligonucleotide
cagagacuuggcugcaagaaacugu

SEQ ID NO: 153187 - RNA, 25 nt, Artificial Sequence
  Description of Artificial Sequence: Synthetic oligonucleotide
uaugcuggaugaaaaauucacaguc

SEQ ID NO: 153188 - RNA, 25 nt, Artificial Sequence
  Description of Artificial Sequence: Synthetic oligonucleotide
caagguugcugauuuuggucuugcc

SEQ ID NO: 153189 - RNA, 25 nt, Artificial Sequence
  Description of Artificial Sequence: Synthetic oligonucleotide
cagagacauguaugauaaagaauac

SEQ ID NO: 153190 - RNA, 25 nt, Artificial Sequence
  Description of Artificial Sequence: Synthetic oligonucleotide
cuauaguguacacaacaaaacaggu

SEQ ID NO: 153191 - RNA, 25 nt, Artificial Sequence
  Description of Artificial Sequence: Synthetic oligonucleotide
ugcaaagcugccagugaaguggaug

SEQ ID NO: 153192 - RNA, 25 nt, Artificial Sequence
  Description of Artificial Sequence: Synthetic oligonucleotide
ggcuuuggaaagucugcaaacucaa

SEQ ID NO: 153193 - RNA, 25 nt, Artificial Sequence
  Description of Artificial Sequence: Synthetic oligonucleotide
aaaguuuaccaccaagucagaugug

SEQ ID NO: 153194 - RNA, 25 nt, Artificial Sequence
  Description of Artificial Sequence: Synthetic oligonucleotide
gugguccuuuggcgugcuccucugg

SEQ ID NO: 153195 - RNA, 25 nt, Artificial Sequence
  Description of Artificial Sequence: Synthetic oligonucleotide
ggagcugaugacaagaggagcccca

SEQ ID NO: 153196 - RNA, 25 nt, Artificial Sequence
  Description of Artificial Sequence: Synthetic oligonucleotide
accuuauccugacguaaacaccuuu

SEQ ID NO: 153197 - RNA, 25 nt, Artificial Sequence
  Description of Artificial Sequence: Synthetic oligonucleotide
ugauauaacuguuuacuuguugcaa

SEQ ID NO: 153198 - RNA, 25 nt, Artificial Sequence
  Description of Artificial Sequence: Synthetic oligonucleotide
agggagaagacuccuacaacccgaa

SEQ ID NO: 153199 - RNA, 25 nt, Artificial Sequence
  Description of Artificial Sequence: Synthetic oligonucleotide
auacugcccagaccccuuauaugaa

SEQ ID NO: 153200 - RNA, 25 nt, Artificial Sequence
  Description of Artificial Sequence: Synthetic oligonucleotide
aguaaugcuaaaaugcuggcacccu

SEQ ID NO: 153201 - RNA, 25 nt, Artificial Sequence
  Description of Artificial Sequence: Synthetic oligonucleotide
uaaagccgaaaugcgcccauccuuu

SEQ ID NO: 153202 - RNA, 25 nt, Artificial Sequence
  Description of Artificial Sequence: Synthetic oligonucleotide
uucugaacuggugucccggauauca

SEQ ID NO: 153203 - RNA, 25 nt, Artificial Sequence
  Description of Artificial Sequence: Synthetic oligonucleotide
agcgaucuucucuacuuucauuggg

SEQ ID NO: 153204 - RNA, 25 nt, Artificial Sequence
  Description of Artificial Sequence: Synthetic oligonucleotide
ggagcacuauguccaugugaacgcu

SEQ ID NO: 153205 - RNA, 25 nt, Artificial Sequence
  Description of Artificial Sequence: Synthetic oligonucleotide
uacuuaugugaacguaaaauguguc

SEQ ID NO: 153206 - RNA, 25 nt, Artificial Sequence
  Description of Artificial Sequence: Synthetic oligonucleotide
cgcuccguauccuucucuguuguca

SEQ ID NO: 153207 - RNA, 25 nt, Artificial Sequence
  Description of Artificial Sequence: Synthetic oligonucleotide
aucagaagauaacgcugaugaugag

SEQ ID NO: 153208 - RNA, 25 nt, Artificial Sequence
  Description of Artificial Sequence: Synthetic oligonucleotide
gguggacacacgaccagccuccuuc

SEQ ID NO: 153209 - RNA, 25 nt, Artificial Sequence
  Description of Artificial Sequence: Synthetic oligonucleotide
cugggagacaucauagugcuaguac

SEQ ID NO: 153210 - RNA, 25 nt, Artificial Sequence
  Description of Artificial Sequence: Synthetic oligonucleotide
cuaugucaaagcaacaguccacacu

SEQ ID NO: 153211 - RNA, 25 nt, Artificial Sequence
  Description of Artificial Sequence: Synthetic oligonucleotide
uuuguccaaugguuuuuucacugcc

SEQ ID NO: 153212 - RNA, 25 nt, Artificial Sequence
  Description of Artificial Sequence: Synthetic oligonucleotide
cugaccuuuaaaaggccaucgauau

SEQ ID NO: 153213 - RNA, 25 nt, Artificial Sequence
  Description of Artificial Sequence: Synthetic oligonucleotide
uucuuugcucuugccaaaauugcac

SEQ ID NO: 153214 - RNA, 25 nt, Artificial Sequence
  Description of Artificial Sequence: Synthetic oligonucleotide
cuauuauaggacuuguauuguuauu

SEQ ID NO: 153215 - RNA, 25 nt, Artificial Sequence
  Description of Artificial Sequence: Synthetic oligonucleotide
uuaaauuacuggauucuaaggaauu

SEQ ID NO: 153216 - RNA, 25 nt, Artificial Sequence
  Description of Artificial Sequence: Synthetic oligonucleotide
uucuuaucugacagagcaucagaac

SEQ ID NO: 153217 - RNA, 25 nt, Artificial Sequence
  Description of Artificial Sequence: Synthetic oligonucleotide
ccagaggcuuggucccacaggccac

SEQ ID NO: 153218 - RNA, 25 nt, Artificial Sequence
  Description of Artificial Sequence: Synthetic oligonucleotide
cggaccaauggccugcagccgugac

SEQ ID NO: 153219 - RNA, 25 nt, Artificial Sequence
  Description of Artificial Sequence: Synthetic oligonucleotide
caacacuccugucauauuggagucc

SEQ ID NO: 153220 - RNA, 25 nt, Artificial Sequence
  Description of Artificial Sequence: Synthetic oligonucleotide
caaaacuugaauucuggguugaauu

SEQ ID NO: 153221 - RNA, 25 nt, Artificial Sequence
  Description of Artificial Sequence: Synthetic oligonucleotide
uuuuuaaaaaucagguaccacuuga

SEQ ID NO: 153222 - RNA, 25 nt, Artificial Sequence
  Description of Artificial Sequence: Synthetic oligonucleotide
auuucauaugggaaauugaagcagg

SEQ ID NO: 153223 - RNA, 25 nt, Artificial Sequence
  Description of Artificial Sequence: Synthetic oligonucleotide
gaaauauugagggcuucuugaucac

SEQ ID NO: 153224 - RNA, 25 nt, Artificial Sequence
  Description of Artificial Sequence: Synthetic oligonucleotide
cagaaaacucagaagagauaguaau

SEQ ID NO: 153225 - RNA, 25 nt, Artificial Sequence
  Description of Artificial Sequence: Synthetic oligonucleotide
ugcucaggacaggagcggcagcccc

SEQ ID NO: 153226 - RNA, 25 nt, Artificial Sequence
  Description of Artificial Sequence: Synthetic oligonucleotide
cagaacaggccacucauuuagaauu

SEQ ID NO: 153227 - RNA, 25 nt, Artificial Sequence
  Description of Artificial Sequence: Synthetic oligonucleotide
ucuaguguuucaaaacacuuuugug

SEQ ID NO: 153228 - RNA, 25 nt, Artificial Sequence
  Description of Artificial Sequence: Synthetic oligonucleotide
guguuguauggucaauaacauuuuu

SEQ ID NO: 153229 - RNA, 25 nt, Artificial Sequence
  Description of Artificial Sequence: Synthetic oligonucleotide
ucauuacugauggugucauucaccc

SEQ ID NO: 153230 - RNA, 25 nt, Artificial Sequence
  Description of Artificial Sequence: Synthetic oligonucleotide
cauuagguaaacauucccuuuuaaa

SEQ ID NO: 153231 - RNA, 25 nt, Artificial Sequence
  Description of Artificial Sequence: Synthetic oligonucleotide
auguuuguuuguuuuuugagacagg

SEQ ID NO: 153232 - RNA, 25 nt, Artificial Sequence
  Description of Artificial Sequence: Synthetic oligonucleotide
gaucucacucuguugccagggcugu

SEQ ID NO: 153233 - RNA, 25 nt, Artificial Sequence
  Description of Artificial Sequence: Synthetic oligonucleotide
uagugcaguggugugaucauagcuc

SEQ ID NO: 153234 - RNA, 25 nt, Artificial Sequence
  Description of Artificial Sequence: Synthetic oligonucleotide
cacugcaaccuccaccucccaggcu

SEQ ID NO: 153235 - RNA, 25 nt, Artificial Sequence
  Description of Artificial Sequence: Synthetic oligonucleotide
ucaagccucccgaauagcugggacu

SEQ ID NO: 153236 - RNA, 25 nt, Artificial Sequence
  Description of Artificial Sequence: Synthetic oligonucleotide
uacaggcgcacaccaccauccccgg

SEQ ID NO: 153237 - RNA, 25 nt, Artificial Sequence
  Description of Artificial Sequence: Synthetic oligonucleotide
gcuaauuuuuguauuuuuuguagag

SEQ ID NO: 153238 - RNA, 25 nt, Artificial Sequence
  Description of Artificial Sequence: Synthetic oligonucleotide
gacgggguuuugccauguugccaag

SEQ ID NO: 153239 - RNA, 25 nt, Artificial Sequence
  Description of Artificial Sequence: Synthetic oligonucleotide
ggcugguuucaaacuccuggacuca

SEQ ID NO: 153240 - RNA, 25 nt, Artificial Sequence
  Description of Artificial Sequence: Synthetic oligonucleotide
aagaaauccacccaccucagccucc

SEQ ID NO: 153241 - RNA, 25 nt, Artificial Sequence
  Description of Artificial Sequence: Synthetic oligonucleotide
ccaaagugcuaggauuacaggcaug

SEQ ID NO: 153242 - RNA, 25 nt, Artificial Sequence
  Description of Artificial Sequence: Synthetic oligonucleotide
gagccacugcgcccagcccuuauaa

SEQ ID NO: 153243 - RNA, 25 nt, Artificial Sequence
  Description of Artificial Sequence: Synthetic oligonucleotide
aauuuuuguauagacauuccuuugg

SEQ ID NO: 153244 - RNA, 25 nt, Artificial Sequence
  Description of Artificial Sequence: Synthetic oligonucleotide
guuggaagaauauuuauaggcaaua

SEQ ID NO: 153245 - RNA, 25 nt, Artificial Sequence
  Description of Artificial Sequence: Synthetic oligonucleotide
acagucaaaguuucaaaauagcauc

SEQ ID NO: 153246 - RNA, 25 nt, Artificial Sequence
  Description of Artificial Sequence: Synthetic oligonucleotide
cacacaaaacauguuuauaaaugaa

SEQ ID NO: 153247 - RNA, 25 nt, Artificial Sequence
  Description of Artificial Sequence: Synthetic oligonucleotide
acaggauguaauguacauagaugac

SEQ ID NO: 153248 - RNA, 25 nt, Artificial Sequence
  Description of Artificial Sequence: Synthetic oligonucleotide
cauuaagaaaauuuguaugaaauaa

SEQ ID NO: 153249 - RNA, 25 nt, Artificial Sequence
  Description of Artificial Sequence: Synthetic oligonucleotide
auuuagucaucaugaaauauuuagu

SEQ ID NO: 153250 - RNA, 25 nt, Artificial Sequence
  Description of Artificial Sequence: Synthetic oligonucleotide
uugucauauaaaaacccacuguuug

SEQ ID NO: 153251 - RNA, 25 nt, Artificial Sequence
  Description of Artificial Sequence: Synthetic oligonucleotide
gagaaugaugcuacucugaucuaau

SEQ ID NO: 153252 - RNA, 25 nt, Artificial Sequence
  Description of Artificial Sequence: Synthetic oligonucleotide
ugaaugugaacauguagauguuuug

SEQ ID NO: 153253 - RNA, 25 nt, Artificial Sequence
  Description of Artificial Sequence: Synthetic oligonucleotide
guguguauuuuuuuaaaugaaaacu

SEQ ID NO: 153254 - RNA, 25 nt, Artificial Sequence
  Description of Artificial Sequence: Synthetic oligonucleotide
ucaaaauaagacaaguaauuuguug

SEQ ID NO: 153255 - RNA, 25 nt, Artificial Sequence
  Description of Artificial Sequence: Synthetic oligonucleotide
gauaaauauuuuuaaagauaacuca

SEQ ID NO: 153256 - RNA, 25 nt, Artificial Sequence
  Description of Artificial Sequence: Synthetic oligonucleotide
agcauguuuguaaagcaggauacau

SEQ ID NO: 153257 - RNA, 25 nt, Artificial Sequence
  Description of Artificial Sequence: Synthetic oligonucleotide
uuuuacuaaaagguucauugguucc

SEQ ID NO: 153258 - RNA, 25 nt, Artificial Sequence
  Description of Artificial Sequence: Synthetic oligonucleotide
caaucacagcucauagguagagcaa

SEQ ID NO: 153259 - RNA, 25 nt, Artificial Sequence
  Description of Artificial Sequence: Synthetic oligonucleotide
aagaaaggguggauggauugaaaag

SEQ ID NO: 153260 - RNA, 25 nt, Artificial Sequence
  Description of Artificial Sequence: Synthetic oligonucleotide
gauuagccucugucucgguggcagg

SEQ ID NO: 153261 - RNA, 25 nt, Artificial Sequence
  Description of Artificial Sequence: Synthetic oligonucleotide
guucccaccucgcaagcaauuggaa

SEQ ID NO: 153262 - RNA, 25 nt, Artificial Sequence
  Description of Artificial Sequence: Synthetic oligonucleotide
aacaaaacuuuuggggaguuuuauu

SEQ ID NO: 153263 - RNA, 25 nt, Artificial Sequence
  Description of Artificial Sequence: Synthetic oligonucleotide
uuugcauuaggguguguuuuauguu

SEQ ID NO: 153264 - RNA, 25 nt, Artificial Sequence
  Description of Artificial Sequence: Synthetic oligonucleotide
uaagcaaaacauacuuuagaaacaa

SEQ ID NO: 153265 - RNA, 25 nt, Artificial Sequence
  Description of Artificial Sequence: Synthetic oligonucleotide
aaugaaaaaggcaauugaaaauccc

SEQ ID NO: 153266 - RNA, 25 nt, Artificial Sequence
  Description of Artificial Sequence: Synthetic oligonucleotide
cagcuauuucaccuagauggaauag

SEQ ID NO: 153267 - RNA, 25 nt, Artificial Sequence
  Description of Artificial Sequence: Synthetic oligonucleotide
gccacccugagcagaacuuugugau

SEQ ID NO: 153268 - RNA, 25 nt, Artificial Sequence
  Description of Artificial Sequence: Synthetic oligonucleotide
ugcuucauucuguggaauuuugugc

SEQ ID NO: 153269 - RNA, 25 nt, Artificial Sequence
  Description of Artificial Sequence: Synthetic oligonucleotide
cuugcuacuguauagugcauguggu

SEQ ID NO: 153270 - RNA, 25 nt, Artificial Sequence
  Description of Artificial Sequence: Synthetic oligonucleotide
uguagguuacucuaacugguuuugu

SEQ ID NO: 153271 - RNA, 25 nt, Artificial Sequence
  Description of Artificial Sequence: Synthetic oligonucleotide
ucgacguaaacauuuaaaguguuau

SEQ ID NO: 153272 - RNA, 25 nt, Artificial Sequence
  Description of Artificial Sequence: Synthetic oligonucleotide
uauuuuuuauaaaaauguuuauuuu

SEQ ID NO: 153273 - RNA, 25 nt, Artificial Sequence
  Description of Artificial Sequence: Synthetic oligonucleotide
uuaaugauaugagaaaaauuuuguu

SEQ ID NO: 153274 - RNA, 25 nt, Artificial Sequence
  Description of Artificial Sequence: Synthetic oligonucleotide
uaggccacaaaaacacugcacugug

SEQ ID NO: 153275 - RNA, 25 nt, Artificial Sequence
  Description of Artificial Sequence: Synthetic oligonucleotide
gaacauuuuagaaaagguaugucag

SEQ ID NO: 153276 - RNA, 25 nt, Artificial Sequence
  Description of Artificial Sequence: Synthetic oligonucleotide
gacugggauuaaugacagcaugauu

SEQ ID NO: 153277 - RNA, 25 nt, Artificial Sequence
  Description of Artificial Sequence: Synthetic oligonucleotide
uuucaaugacuguaaauugcgauaa

SEQ ID NO: 153278 - RNA, 25 nt, Artificial Sequence
  Description of Artificial Sequence: Synthetic oligonucleotide
aggaaauguacugauugccaauaca

SEQ ID NO: 153279 - RNA, 25 nt, Artificial Sequence
  Description of Artificial Sequence: Synthetic oligonucleotide
accccacccucauuacaucaucagg

SEQ ID NO: 153280 - RNA, 25 nt, Artificial Sequence
  Description of Artificial Sequence: Synthetic oligonucleotide
gacuugaagccaaggguuaacccag

SEQ ID NO: 153281 - RNA, 25 nt, Artificial Sequence
  Description of Artificial Sequence: Synthetic oligonucleotide
gcaagcuacaaagagggugugucac

SEQ ID NO: 153282 - RNA, 25 nt, Artificial Sequence
  Description of Artificial Sequence: Synthetic oligonucleotide
cacugaaacucaauaguugaguuug

SEQ ID NO: 153283 - RNA, 25 nt, Artificial Sequence
  Description of Artificial Sequence: Synthetic oligonucleotide
ggcuguuguugcaggaaaaugauua

SEQ ID NO: 153284 - RNA, 25 nt, Artificial Sequence
  Description of Artificial Sequence: Synthetic oligonucleotide
auaacuaaaagcucucugauagugc

SEQ ID NO: 153285 - RNA, 25 nt, Artificial Sequence
  Description of Artificial Sequence: Synthetic oligonucleotide
cagagacuuaccagaagacacaagg

SEQ ID NO: 153286 - RNA, 25 nt, Artificial Sequence
  Description of Artificial Sequence: Synthetic oligonucleotide
gaauuguacugaagagcuauuacaa

SEQ ID NO: 153287 - RNA, 25 nt, Artificial Sequence
  Description of Artificial Sequence: Synthetic oligonucleotide
auccaaauauugccguuucauaaau

SEQ ID NO: 153288 - RNA, 25 nt, Artificial Sequence
  Description of Artificial Sequence: Synthetic oligonucleotide
uguaauaaguaauacuaauucacag

SEQ ID NO: 153289 - RNA, 25 nt, Artificial Sequence
  Description of Artificial Sequence: Synthetic oligonucleotide
gaguauuguaaaugguggaugacaa

SEQ ID NO: 153290 - RNA, 25 nt, Artificial Sequence
  Description of Artificial Sequence: Synthetic oligonucleotide
aaagaaaaucugcucuguggaaaga

SEQ ID NO: 153291 - RNA, 25 nt, Artificial Sequence
  Description of Artificial Sequence: Synthetic oligonucleotide
aaagaacugucucuaccagggucaa

SEQ ID NO: 153292 - RNA, 25 nt, Artificial Sequence
  Description of Artificial Sequence: Synthetic oligonucleotide
agagcaugaacgcaucaauagaaag

SEQ ID NO: 153293 - RNA, 25 nt, Artificial Sequence
  Description of Artificial Sequence: Synthetic oligonucleotide
gaacucggggaaacaucccaucaac

SEQ ID NO: 153294 - RNA, 25 nt, Artificial Sequence
  Description of Artificial Sequence: Synthetic oligonucleotide
caggacuacacacuuguauauacau

SEQ ID NO: 153295 - RNA, 25 nt, Artificial Sequence
  Description of Artificial Sequence: Synthetic oligonucleotide
uucuugagaacacugcaaugugaaa

SEQ ID NO: 153296 - RNA, 25 nt, Artificial Sequence
  Description of Artificial Sequence: Synthetic oligonucleotide
aaucacguuugcuauuuauaaacuu

SEQ ID NO: 153297 - RNA, 25 nt, Artificial Sequence
  Description of Artificial Sequence: Synthetic oligonucleotide
uguccuuagauuaaugugucuggac

SEQ ID NO: 153298 - RNA, 25 nt, Artificial Sequence
  Description of Artificial Sequence: Synthetic oligonucleotide
cagauugugggaguaagugauucuu

SEQ ID NO: 153299 - RNA, 25 nt, Artificial Sequence
  Description of Artificial Sequence: Synthetic oligonucleotide
ucuaagaauuagauacuugucacug

SEQ ID NO: 153300 - RNA, 25 nt, Artificial Sequence
  Description of Artificial Sequence: Synthetic oligonucleotide
gccuauaccugcagcugaacugaau

SEQ ID NO: 153301 - RNA, 25 nt, Artificial Sequence
  Description of Artificial Sequence: Synthetic oligonucleotide
ugguacuucguauguuaauaguugu

SEQ ID NO: 153302 - RNA, 25 nt, Artificial Sequence
  Description of Artificial Sequence: Synthetic oligonucleotide
uucugauaaaucaugcaauuaaagu

SEQ ID NO: 153303 - RNA, 25 nt, Artificial Sequence
  Description of Artificial Sequence: Synthetic oligonucleotide
uaaagugaugcaacaucuuguaaaa

SEQ ID NO: 153304 - DNA, 21 bp, Artificial Sequence
  Description of Artificial Sequence: Synthetic oligonucleotide
  Description of Combined DNA/RNA Molecule: Synthetic oligonucleotide
cuacacaaaucagcgauuutt

SEQ ID NO: 153305 - DNA, 21 bp, Artificial Sequence
  Description of Artificial Sequence: Synthetic oligonucleotide
  Description of Combined DNA/RNA Molecule: Synthetic oligonucleotide
aaaucgcugauuuguguagtt

SEQ ID NO: 153306 - DNA, 25 bp, Artificial Sequence
  Description of Artificial Sequence: Synthetic oligonucleotide
  Description of Combined DNA/RNA Molecule: Synthetic oligonucleotide
cuacacaaaucagcgauuuccaugt

SEQ ID NO: 153307 - RNA, 27 nt, Artificial Sequence
  Description of Artificial Sequence: Synthetic oligonucleotide
acauggaaaucgcugauuuguguaguc

SEQ ID NO: 153308 - RNA, 13 nt, Artificial Sequence
  Description of Artificial Sequence: Synthetic oligonucleotide
cuacacaaaucag

SEQ ID NO: 153309 - DNA, 11 bp, Artificial Sequence
  Description of Artificial Sequence: Synthetic oligonucleotide
  Description of Combined DNA/RNA Molecule: Synthetic oligonucleotide
gauuuccaugt

SEQ ID NO: 153310 - DNA, 21 bp, Artificial Sequence
  Description of Artificial Sequence: Synthetic oligonucleotide
  Description of Combined DNA/RNA Molecule: Synthetic oligonucleotide
ggaucuuauuucuucggagtt

SEQ ID NO: 153311 - DNA, 21 bp, Artificial Sequence
  Description of Artificial Sequence: Synthetic oligonucleotide
  Description of Combined DNA/RNA Molecule: Synthetic oligonucleotide
cuccgaagaaauaagaucctt

SEQ ID NO: 153312 - RNA, 11 nt, Artificial Sequence
  Description of Artificial Sequence: Synthetic oligonucleotide
ggaucuuauuu

SEQ ID NO: 153313 - DNA, 10 bp, Artificial Sequence
  Description of Artificial Sequence: Synthetic oligonucleotide
  Description of Combined DNA/RNA Molecule: Synthetic oligonucleotide
cuucggagtt

SEQ ID NO: 153314 - RNA, 27 nt, Artificial Sequence
  Description of Artificial Sequence: Synthetic oligonucleotide
cauugucuccgaagaaauaagauccuu

SEQ ID NO: 153315 - RNA, 8 nt, Artificial Sequence
  Description of Artificial Sequence: Synthetic oligonucleotide
  modified_base (2): LNA-G
ggaucuua

SEQ ID NO: 153316 - DNA, 17 bp, Artificial Sequence
  Description of Artificial Sequence: Synthetic oligonucleotide
  Description of Combined DNA/RNA Molecule: Synthetic oligonucleotide
uuucuucggagacaatg

SEQ ID NO: 153317 - DNA, 16 bp, Artificial Sequence
  Description of Artificial Sequence: Synthetic oligonucleotide
  Description of Combined DNA/RNA Molecule: Synthetic oligonucleotide
uucuucggagacaatg

SEQ ID NO: 153318 - DNA, 15 bp, Artificial Sequence
  Description of Artificial Sequence: Synthetic oligonucleotide
  Description of Combined DNA/RNA Molecule: Synthetic oligonucleotide
ucuucggagacaatg

SEQ ID NO: 153319 - DNA, 14 bp, Artificial Sequence
  Description of Artificial Sequence: Synthetic oligonucleotide
  Description of Combined DNA/RNA Molecule: Synthetic oligonucleotide
cuucggagacaatg

SEQ ID NO: 153320 - DNA, 13 bp, Artificial Sequence
  Description of Artificial Sequence: Synthetic oligonucleotide
  Description of Combined DNA/RNA Molecule: Synthetic oligonucleotide
uucggagacaatg

SEQ ID NO: 153321 - DNA, 12 bp, Artificial Sequence
  Description of Artificial Sequence: Synthetic oligonucleotide
  Description of Combined DNA/RNA Molecule: Synthetic oligonucleotide
ucggagacaatg

SEQ ID NO: 153322 - DNA, 11 bp, Artificial Sequence
  Description of Artificial Sequence: Synthetic oligonucleotide
  Description of Combined DNA/RNA Molecule: Synthetic oligonucleotide
cggagacaatg

SEQ ID NO: 153323 - RNA, 9 nt, Artificial Sequence
  Description of Artificial Sequence: Synthetic oligonucleotide
  modified_base (2): LNA-G
ggaucuuau

SEQ ID NO: 153324 - RNA, 10 nt, Artificial Sequence
  Description of Artificial Sequence: Synthetic oligonucleotide
  modified_base (2): LNA-G
ggaucuuauu

SEQ ID NO: 153325 - RNA, 11 nt, Artificial Sequence
  Description of Artificial Sequence: Synthetic oligonucleotide
  modified_base (2): LNA-G
ggaucuuauuu

SEQ ID NO: 153326 - RNA, 12 nt, Artificial Sequence
  Description of Artificial Sequence: Synthetic oligonucleotide
  modified_base (2): LNA-G
ggaucuuauuuc

SEQ ID NO: 153327 - RNA, 8 nt, Artificial Sequence
  Description of Artificial Sequence: Synthetic oligonucleotide
  modified_base (3): LNA-A
cuacacaa

SEQ ID NO: 153328 - DNA, 13 bp, Artificial Sequence
  Description of Artificial Sequence: Synthetic oligonucleotide
  Description of Combined DNA/RNA Molecule: Synthetic oligonucleotide
  modified_base (8): LNA-A
aucagcgauuutt

SEQ ID NO: 153329 - DNA, 12 bp, Artificial Sequence
  Description of Artificial Sequence: Synthetic oligonucleotide
  Description of Combined DNA/RNA Molecule: Synthetic oligonucleotide
  modified_base (7): LNA-A
ucagcgauuutt

SEQ ID NO: 153330 - DNA, 11 bp, Artificial Sequence
  Description of Artificial Sequence: Synthetic oligonucleotide
  Description of Combined DNA/RNA Molecule: Synthetic oligonucleotide
  modified_base (6): LNA-A
cagcgauuutt

SEQ ID NO: 153331 - DNA, 10 bp, Artificial Sequence
  Description of Artificial Sequence: Synthetic oligonucleotide
  Description of Combined DNA/RNA Molecule: Synthetic oligonucleotide
  modified_base (5): LNA-A
agcgauuutt

SEQ ID NO: 153332 - DNA, 9 bp, Artificial Sequence
  Description of Artificial Sequence: Synthetic oligonucleotide
  Description of Combined DNA/RNA Molecule: Synthetic oligonucleotide
  modified_base (4): LNA-A
gcgauuutt

SEQ ID NO: 153333 - DNA, 8 bp, Artificial Sequence
  Description of Artificial Sequence: Synthetic oligonucleotide
  Description of Combined DNA/RNA Molecule: Synthetic oligonucleotide
  modified_base (3): LNA-A
cgauuutt

SEQ ID NO: 153334 - DNA, 7 bp, Artificial Sequence
  Description of Artificial Sequence: Synthetic oligonucleotide
  Description of Combined DNA/RNA Molecule: Synthetic oligonucleotide
  modified_base (2): LNA-A
gauuutt

SEQ ID NO: 153335 - RNA, 9 nt, Artificial Sequence
  Description of Artificial Sequence: Synthetic oligonucleotide
  modified_base (3): LNA-A
cuacacaaa

SEQ ID NO: 153336 - RNA, 10 nt, Artificial Sequence
  Description of Artificial Sequence: Synthetic oligonucleotide
  modified_base (3): LNA-A
cuacacaaau

SEQ ID NO: 153337 - RNA, 11 nt, Artificial Sequence
  Description of Artificial Sequence: Synthetic oligonucleotide
  modified_base (3): LNA-A
cuacacaaauc

SEQ ID NO: 153338 - RNA, 12 nt, Artificial Sequence
  Description of Artificial Sequence: Synthetic oligonucleotide
  modified_base (3): LNA-A
cuacacaaauca

SEQ ID NO: 153339 - RNA, 13 nt, Artificial Sequence
  Description of Artificial Sequence: Synthetic oligonucleotide
  modified_base (3): LNA-A
cuacacaaaucag

SEQ ID NO: 153340 - RNA, 14 nt, Artificial Sequence
  Description of Artificial Sequence: Synthetic oligonucleotide
  modified_base (3): LNA-A
cuacacaaaucagc

SEQ ID NO: 153341 - RNA, 13 nt, Artificial Sequence
  Description of Artificial Sequence: Synthetic oligonucleotide
  modified_base (2): LNA-G
ggaucuuauuucu

SEQ ID NO: 153342 - RNA, 14 nt, Artificial Sequence
  Description of Artificial Sequence: Synthetic oligonucleotide
  modified_base (2): LNA-G
ggaucuuauuucuu

SEQ ID NO: 153343 - RNA, 8 nt, Artificial Sequence
  Description of Artificial Sequence: Synthetic oligonucleotide
  modified_base (2): LNA-G
  modified_base (8): LNA-A
ggaucuua

SEQ ID NO: 153344 - RNA, 9 nt, Artificial Sequence
  Description of Artificial Sequence: Synthetic oligonucleotide
  modified_base (2): LNA-G
  modified_base (9): LNA-U
ggaucuuau

SEQ ID NO: 153345 - RNA, 10 nt, Artificial Sequence
  Description of Artificial Sequence: Synthetic oligonucleotide
  modified_base (2): LNA-G
  modified_base (10): LNA-U
ggaucuuauu

SEQ ID NO: 153346 - RNA, 11 nt, Artificial Sequence
  Description of Artificial Sequence: Synthetic oligonucleotide
  modified_base (2): LNA-G
  modified_base (11): LNA-U
ggaucuuauuu

SEQ ID NO: 153347 - RNA, 12 nt, Artificial Sequence
  Description of Artificial Sequence: Synthetic oligonucleotide
  modified_base (2): LNA-G
  modified_base (12): LNA-C
ggaucuuauuuc

SEQ ID NO: 153348 - RNA, 13 nt, Artificial Sequence
  Description of Artificial Sequence: Synthetic oligonucleotide
  modified_base (2): LNA-G
  modified_base (13): LNA-U
ggaucuuauuucu

SEQ ID NO: 153349 - RNA, 14 nt, Artificial Sequence
  Description of Artificial Sequence: Synthetic oligonucleotide
  modified_base (2): LNA-G
  modified_base (14): LNA-U
ggaucuuauuucuu

SEQ ID NO: 153350 - DNA, 13 bp, Artificial Sequence
  Description of Artificial Sequence: Synthetic oligonucleotide
  Description of Combined DNA/RNA Molecule: Synthetic oligonucleotide
  modified_base (8): LNA-G
uuucuucggagtt

SEQ ID NO: 153351 - DNA, 12 bp, Artificial Sequence
  Description of Artificial Sequence: Synthetic oligonucleotide
  Description of Combined DNA/RNA Molecule: Synthetic oligonucleotide
  modified_base (7): LNA-G
uucuucggagtt

SEQ ID NO: 153352 - DNA, 11 bp, Artificial Sequence
  Description of Artificial Sequence: Synthetic oligonucleotide
  Description of Combined DNA/RNA Molecule: Synthetic oligonucleotide
  modified_base (6): LNA-G
ucuucggagtt

SEQ ID NO: 153353 - DNA, 10 bp, Artificial Sequence
  Description of Artificial Sequence: Synthetic oligonucleotide
  Description of Combined DNA/RNA Molecule: Synthetic oligonucleotide
  modified_base (5): LNA-G
cuucggagtt

SEQ ID NO: 153354 - DNA, 9 bp, Artificial Sequence
  Description of Artificial Sequence: Synthetic oligonucleotide
  Description of Combined DNA/RNA Molecule: Synthetic oligonucleotide
  modified_base (4): LNA-G
uucggagtt

SEQ ID NO: 153355 - DNA, 8 bp, Artificial Sequence
  Description of Artificial Sequence: Synthetic oligonucleotide
  Description of Combined DNA/RNA Molecule: Synthetic oligonucleotide
  modified_base (3): LNA-G
ucggagtt

SEQ ID NO: 153356 - DNA, 7 bp, Artificial Sequence
  Description of Artificial Sequence: Synthetic oligonucleotide
  Description of Combined DNA/RNA Molecule: Synthetic oligonucleotide
  modified_base (2): LNA-G
cggagtt

SEQ ID NO: 153357 - DNA, 13 bp, Artificial Sequence
  Description of Artificial Sequence: Synthetic oligonucleotide
  Description of Combined DNA/RNA Molecule: Synthetic oligonucleotide
  modified_base (1): LNA-U
  modified_base (8): LNA-G
uuucuucggagtt

SEQ ID NO: 153358 - DNA, 12 bp, Artificial Sequence
  Description of Artificial Sequence: Synthetic oligonucleotide
  Description of Combined DNA/RNA Molecule: Synthetic oligonucleotide
  modified_base (1): LNA-U
  modified_base (7): LNA-G
uucuucggagtt

SEQ ID NO: 153359 - DNA, 11 bp, Artificial Sequence
  Description of Artificial Sequence: Synthetic oligonucleotide
  Description of Combined DNA/RNA Molecule: Synthetic oligonucleotide
  modified_base (1): LNA-U
  modified_base (6): LNA-G
ucuucggagtt

SEQ ID NO: 153360 - DNA, 10 bp, Artificial Sequence
  Description of Artificial Sequence: Synthetic oligonucleotide
  Description of Combined DNA/RNA Molecule: Synthetic oligonucleotide
  modified_base (1): LNA-C
  modified_base (5): LNA-G
cuucggagtt

SEQ ID NO: 153361 - DNA, 9 bp, Artificial Sequence
  Description of Artificial Sequence: Synthetic oligonucleotide
  Description of Combined DNA/RNA Molecule: Synthetic oligonucleotide
  modified_base (1): LNA-U
  modified_base (4): LNA-G
uucggagtt

SEQ ID NO: 153362 - DNA, 8 bp, Artificial Sequence
  Description of Artificial Sequence: Synthetic oligonucleotide
  Description of Combined DNA/RNA Molecule: Synthetic oligonucleotide
  modified_base (1): LNA-U
  modified_base (3): LNA-G
ucggagtt

SEQ ID NO: 153363 - DNA, 7 bp, Artificial Sequence
  Description of Artificial Sequence: Synthetic oligonucleotide
  Description of Combined DNA/RNA Molecule: Synthetic oligonucleotide
  modified_base (1): LNA-C
  modified_base (2): LNA-G
cggagtt

SEQ ID NO: 153364 - DNA, 21 bp, Artificial Sequence
  Description of Artificial Sequence: Synthetic oligonucleotide
  Description of Combined DNA/RNA Molecule: Synthetic oligonucleotide
  modified_base (2): LNA-G
  modified_base (16): LNA-G
ggaucuuauuucuucggagtt

SEQ ID NO: 153365 - DNA, 25 bp, Artificial Sequence
  Description of Artificial Sequence: Synthetic oligonucleotide
  Description of Combined DNA/RNA Molecule: Synthetic oligonucleotide
ggaucuuauuucuucggagacaatg

SEQ ID NO: 153366 - RNA, 25 nt, Artificial Sequence
  Description of Artificial Sequence: Synthetic oligonucleotide
guauuuugaugaggaguucacggcc

SEQ ID NO: 153367 - RNA, 25 nt, Artificial Sequence
  Description of Artificial Sequence: Synthetic oligonucleotide
ggcccagaugaucaccaucacacca

SEQ ID NO: 153368 - RNA, 25 nt, Artificial Sequence
  Description of Artificial Sequence: Synthetic oligonucleotide
gggaagaaaacuauccugcggguuu

SEQ ID NO: 153369 - RNA, 25 nt, Artificial Sequence
  Description of Artificial Sequence: Synthetic oligonucleotide
guuuuaauuuauuucauccaguuug

SEQ ID NO: 153370 - RNA, 25 nt, Artificial Sequence
  Description of Artificial Sequence: Synthetic oligonucleotide
acguagggaaauguuaaggacuucu

SEQ ID NO: 153371 - RNA, 25 nt, Artificial Sequence
  Description of Artificial Sequence: Synthetic oligonucleotide
ccaggguuuacccagugggacagag

SEQ ID NO: 153372 - RNA, 25 nt, Artificial Sequence
  Description of Artificial Sequence: Synthetic oligonucleotide
agcaagguuuaaauuuguuauugug

SEQ ID NO: 153373 - RNA, 25 nt, Artificial Sequence
  Description of Artificial Sequence: Synthetic oligonucleotide
uguauuauguuguucaaaugcauuu

SEQ ID NO: 153374 - RNA, 25 nt, Artificial Sequence
  Description of Artificial Sequence: Synthetic oligonucleotide
uuuuaaucuuugugacaggaaagcc

SEQ ID NO: 153375 - RNA, 25 nt, Artificial Sequence
  Description of Artificial Sequence: Synthetic oligonucleotide
uuaaucuuugugacaggaaagcccu

SEQ ID NO: 153376 - RNA, 25 nt, Artificial Sequence
  Description of Artificial Sequence: Synthetic oligonucleotide
gcugcuuaugucucccagcauggcc

SEQ ID NO: 153377 - RNA, 25 nt, Artificial Sequence
  Description of Artificial Sequence: Synthetic oligonucleotide
aaguguuucagaagcuucucccuga

SEQ ID NO: 153378 - RNA, 25 nt, Artificial Sequence
  Description of Artificial Sequence: Synthetic oligonucleotide
gaccaucaauaaggaagaagcccuu

SEQ ID NO: 153379 - RNA, 25 nt, Artificial Sequence
  Description of Artificial Sequence: Synthetic oligonucleotide
ccaucaauaaggaagaagcccuuca

SEQ ID NO: 153380 - RNA, 25 nt, Artificial Sequence
  Description of Artificial Sequence: Synthetic oligonucleotide
ucaauaaggaagaagcccuucagcg

SEQ ID NO: 153381 - RNA, 25 nt, Artificial Sequence
  Description of Artificial Sequence: Synthetic oligonucleotide
aauaaggaagaagcccuucagcggc

SEQ ID NO: 153382 - RNA, 25 nt, Artificial Sequence
  Description of Artificial Sequence: Synthetic oligonucleotide
aggaagaagcccuucagcggccagu

SEQ ID NO: 153383 - RNA, 25 nt, Artificial Sequence
  Description of Artificial Sequence: Synthetic oligonucleotide
gcauaacuaaaggugaaaagcuccg

SEQ ID NO: 153384 - RNA, 25 nt, Artificial Sequence
  Description of Artificial Sequence: Synthetic oligonucleotide
cauaacuaaaggugaaaagcuccgg

SEQ ID NO: 153385 - RNA, 25 nt, Artificial Sequence
  Description of Artificial Sequence: Synthetic oligonucleotide
cuacaucacgccagucaacagucug

SEQ ID NO: 153386 - RNA, 25 nt, Artificial Sequence
  Description of Artificial Sequence: Synthetic oligonucleotide
acuggauuuaagcagaguucaaaag

SEQ ID NO: 153387 - RNA, 25 nt, Artificial Sequence
  Description of Artificial Sequence: Synthetic oligonucleotide
cuggauuuaagcagaguucaaaagc

SEQ ID NO: 153388 - RNA, 25 nt, Artificial Sequence
  Description of Artificial Sequence: Synthetic oligonucleotide
gauuuaagcagaguucaaaagcccu

SEQ ID NO: 153389 - RNA, 25 nt, Artificial Sequence
  Description of Artificial Sequence: Synthetic oligonucleotide
auuuaagcagaguucaaaagcccuu

SEQ ID NO: 153390 - RNA, 25 nt, Artificial Sequence
  Description of Artificial Sequence: Synthetic oligonucleotide
uuaagcagaguucaaaagcccuuca

SEQ ID NO: 153391 - RNA, 25 nt, Artificial Sequence
  Description of Artificial Sequence: Synthetic oligonucleotide
uaagcagaguucaaaagcccuucag

SEQ ID NO: 153392 - RNA, 25 nt, Artificial Sequence
  Description of Artificial Sequence: Synthetic oligonucleotide
agcagaguucaaaagcccuucagcg

SEQ ID NO: 153393 - RNA, 25 nt, Artificial Sequence
  Description of Artificial Sequence: Synthetic oligonucleotide
cucagggucugagugaagccgcucg

SEQ ID NO: 153394 - RNA, 25 nt, Artificial Sequence
  Description of Artificial Sequence: Synthetic oligonucleotide
caagcaacuacaucacgccagucaa

SEQ ID NO: 153395 - RNA, 25 nt, Artificial Sequence
  Description of Artificial Sequence: Synthetic oligonucleotide
aucaauggcagcuucuuggugcgug

SEQ ID NO: 153396 - RNA, 25 nt, Artificial Sequence
  Description of Artificial Sequence: Synthetic oligonucleotide
uuccagcccacauuggauucaucag

SEQ ID NO: 153397 - RNA, 25 nt, Artificial Sequence
  Description of Artificial Sequence: Synthetic oligonucleotide
cagcugagaauguggaauaccuaag

SEQ ID NO: 153398 - RNA, 25 nt, Artificial Sequence
  Description of Artificial Sequence: Synthetic oligonucleotide
aacguaucuccuaauuugaggcuca

SEQ ID NO: 153399 - RNA, 25 nt, Artificial Sequence
  Description of Artificial Sequence: Synthetic oligonucleotide
ccuaaaauaauuucucuacaauugg

SEQ ID NO: 153400 - RNA, 25 nt, Artificial Sequence
  Description of Artificial Sequence: Synthetic oligonucleotide
uggaagauucagcuaguuaggagcc

SEQ ID NO: 153401 - RNA, 25 nt, Artificial Sequence
  Description of Artificial Sequence: Synthetic oligonucleotide
uuaaacucuccuagucaauauccac

SEQ ID NO: 153402 - RNA, 25 nt, Artificial Sequence
  Description of Artificial Sequence: Synthetic oligonucleotide
cagccuacaguuauguucagucaca

SEQ ID NO: 153403 - RNA, 25 nt, Artificial Sequence
  Description of Artificial Sequence: Synthetic oligonucleotide
guuauguucagucacacacacauac

SEQ ID NO: 153404 - RNA, 25 nt, Artificial Sequence
  Description of Artificial Sequence: Synthetic oligonucleotide
cacauacaaaauguuccuuuugcuu

SEQ ID NO: 153405 - RNA, 25 nt, Artificial Sequence
  Description of Artificial Sequence: Synthetic oligonucleotide
uccuuuugcuuuuaaaguaauuuuu

SEQ ID NO: 153406 - RNA, 25 nt, Artificial Sequence
  Description of Artificial Sequence: Synthetic oligonucleotide
ugaccugugaagcaacagucaaugg

SEQ ID NO: 153407 - RNA, 25 nt, Artificial Sequence
  Description of Artificial Sequence: Synthetic oligonucleotide
cuaucucacacaucgacaaaccaau

SEQ ID NO: 153408 - RNA, 25 nt, Artificial Sequence
  Description of Artificial Sequence: Synthetic oligonucleotide
uguccucaauuguacugcuaccacu

SEQ ID NO: 153409 - RNA, 25 nt, Artificial Sequence
  Description of Artificial Sequence: Synthetic oligonucleotide
aaaccguagcuggcaagcggucuua

SEQ ID NO: 153410 - RNA, 25 nt, Artificial Sequence
  Description of Artificial Sequence: Synthetic oligonucleotide
uagcuggcaagcggucuuaccggcu

SEQ ID NO: 153411 - RNA, 25 nt, Artificial Sequence
  Description of Artificial Sequence: Synthetic oligonucleotide
uuguaugguuaaaagauggguuacc

SEQ ID NO: 153412 - RNA, 25 nt, Artificial Sequence
  Description of Artificial Sequence: Synthetic oligonucleotide
ugguuaaaagauggguuaccugcga

SEQ ID NO: 153413 - RNA, 25 nt, Artificial Sequence
  Description of Artificial Sequence: Synthetic oligonucleotide
cagggaauuauacaaucuugcugag

SEQ ID NO: 153414 - RNA, 25 nt, Artificial Sequence
  Description of Artificial Sequence: Synthetic oligonucleotide
acaaucuugcugagcauaaaacagu

SEQ ID NO: 153415 - RNA, 25 nt, Artificial Sequence
  Description of Artificial Sequence: Synthetic oligonucleotide
ccaauaaugaagaguccuuuauccu

SEQ ID NO: 153416 - RNA, 25 nt, Artificial Sequence
  Description of Artificial Sequence: Synthetic oligonucleotide
acuuuggauguuccaacgcaaguug

SEQ ID NO: 153417 - RNA, 25 nt, Artificial Sequence
  Description of Artificial Sequence: Synthetic oligonucleotide
aaugcuuccacuaaacugaaaccau

SEQ ID NO: 153418 - RNA, 25 nt, Artificial Sequence
  Description of Artificial Sequence: Synthetic oligonucleotide
gagaaaguuugacuuuguuaaauau

SEQ ID NO: 153419 - RNA, 25 nt, Artificial Sequence
  Description of Artificial Sequence: Synthetic oligonucleotide
aaagaacuacuguauauuaaaaguu

SEQ ID NO: 153420 - RNA, 25 nt, Artificial Sequence
  Description of Artificial Sequence: Synthetic oligonucleotide
uuagaaauacggguuuugacuuaac

SEQ ID NO: 153421 - RNA, 25 nt, Artificial Sequence
  Description of Artificial Sequence: Synthetic oligonucleotide
aacauggguacagcaaacucagcac

SEQ ID NO: 153422 - RNA, 25 nt, Artificial Sequence
  Description of Artificial Sequence: Synthetic oligonucleotide
aaagacacagaagaugcugaccuca

SEQ ID NO: 153423 - RNA, 25 nt, Artificial Sequence
  Description of Artificial Sequence: Synthetic oligonucleotide
uaguagggagguuuauucagaucgc

SEQ ID NO: 153424 - RNA, 25 nt, Artificial Sequence
  Description of Artificial Sequence: Synthetic oligonucleotide
gccuucugcagcaggguucugggau

SEQ ID NO: 153425 - RNA, 25 nt, Artificial Sequence
  Description of Artificial Sequence: Synthetic oligonucleotide
ggucugguacauauuggaaauuaug

SEQ ID NO: 153426 - RNA, 25 nt, Artificial Sequence
  Description of Artificial Sequence: Synthetic oligonucleotide
cuaguccuuccgauggaagcacuag

SEQ ID NO: 153427 - RNA, 25 nt, Artificial Sequence
  Description of Artificial Sequence: Synthetic oligonucleotide
ccagugaauauuguuuuuaugugga

SEQ ID NO: 153428 - RNA, 25 nt, Artificial Sequence
  Description of Artificial Sequence: Synthetic oligonucleotide
augaauucaaguuggaauugguaga

SEQ ID NO: 153429 - RNA, 25 nt, Artificial Sequence
  Description of Artificial Sequence: Synthetic oligonucleotide
caggacacagauuuagacuuggaga

SEQ ID NO: 153430 - RNA, 25 nt, Artificial Sequence
  Description of Artificial Sequence: Synthetic oligonucleotide
cucaaagcacaguuacaguauucca

SEQ ID NO: 153431 - RNA, 25 nt, Artificial Sequence
  Description of Artificial Sequence: Synthetic oligonucleotide
accacugccaccacugaugaauuaa

SEQ ID NO: 153432 - RNA, 25 nt, Artificial Sequence
  Description of Artificial Sequence: Synthetic oligonucleotide
gaaacuacuagugccacaucaucac

SEQ ID NO: 153433 - RNA, 25 nt, Artificial Sequence
  Description of Artificial Sequence: Synthetic oligonucleotide
aagucggacagccucaccaaacaga

SEQ ID NO: 153434 - RNA, 25 nt, Artificial Sequence
  Description of Artificial Sequence: Synthetic oligonucleotide
gaaagcgaaaaauggaacaugaugg

SEQ ID NO: 153435 - RNA, 25 nt, Artificial Sequence
  Description of Artificial Sequence: Synthetic oligonucleotide
cccucugauuuagcauguagacugc

SEQ ID NO: 153436 - RNA, 25 nt, Artificial Sequence
  Description of Artificial Sequence: Synthetic oligonucleotide
ugagcuauuuaaggaucuauuuaug

SEQ ID NO: 153437 - RNA, 25 nt, Artificial Sequence
  Description of Artificial Sequence: Synthetic oligonucleotide
aaaaggugaaaaagcacuauuauca

SEQ ID NO: 153438 - RNA, 25 nt, Artificial Sequence
  Description of Artificial Sequence: Synthetic oligonucleotide
gaaaaagcacuauuaucaguucugc

SEQ ID NO: 153439 - RNA, 25 nt, Artificial Sequence
  Description of Artificial Sequence: Synthetic oligonucleotide
ggcugaaaagaaagauuaaaccuac

SEQ ID NO: 153440 - RNA, 25 nt, Artificial Sequence
  Description of Artificial Sequence: Synthetic oligonucleotide
uaaacccuuauaauaaaauccuucu

SEQ ID NO: 153441 - RNA, 25 nt, Artificial Sequence
  Description of Artificial Sequence: Synthetic oligonucleotide
cauacuauuagccaaugcuguagac

SEQ ID NO: 153442 - RNA, 25 nt, Artificial Sequence
  Description of Artificial Sequence: Synthetic oligonucleotide
gacagaagcauuuugauaggaauag

SEQ ID NO: 153443 - RNA, 25 nt, Artificial Sequence
  Description of Artificial Sequence: Synthetic oligonucleotide
agagcaaauaagauaauggcccuga

SEQ ID NO: 153444 - RNA, 25 nt, Artificial Sequence
  Description of Artificial Sequence: Synthetic oligonucleotide
ccaacauuuuucucuuccucaagca

SEQ ID NO: 153445 - RNA, 25 nt, Artificial Sequence
  Description of Artificial Sequence: Synthetic oligonucleotide
uuaaguaugagaaaaguucagccca

SEQ ID NO: 153446 - RNA, 25 nt, Artificial Sequence
  Description of Artificial Sequence: Synthetic oligonucleotide
caggaauaaagauggcugcugaacc

SEQ ID NO: 153447 - RNA, 25 nt, Artificial Sequence
  Description of Artificial Sequence: Synthetic oligonucleotide
aauuugaaugaccaaguucucuuca

SEQ ID NO: 153448 - RNA, 25 nt, Artificial Sequence
  Description of Artificial Sequence: Synthetic oligonucleotide
auguauaaagauagccagccuagag

SEQ ID NO: 153449 - RNA, 25 nt, Artificial Sequence
  Description of Artificial Sequence: Synthetic oligonucleotide
ggcuguaacuaucucugugaagugu

SEQ ID NO: 153450 - RNA, 25 nt, Artificial Sequence
  Description of Artificial Sequence: Synthetic oligonucleotide
ucugugaagugugagaaaauuucaa

SEQ ID NO: 153451 - RNA, 25 nt, Artificial Sequence
  Description of Artificial Sequence: Synthetic oligonucleotide
ccuuuaaggaaaugaauccuccuga

SEQ ID NO: 153452 - RNA, 25 nt, Artificial Sequence
  Description of Artificial Sequence: Synthetic oligonucleotide
aaggauacaaaaagugacaucauau

SEQ ID NO: 153453 - RNA, 25 nt, Artificial Sequence
  Description of Artificial Sequence: Synthetic oligonucleotide
agaugcaauuugaaucuucaucaua

SEQ ID NO: 153454 - RNA, 25 nt, Artificial Sequence
  Description of Artificial Sequence: Synthetic oligonucleotide
guucaaaacgaagacuagcuauuaa

SEQ ID NO: 153455 - RNA, 25 nt, Artificial Sequence
  Description of Artificial Sequence: Synthetic oligonucleotide
gugaaaccucaucucuacuaaaaau

SEQ ID NO: 153456 - RNA, 25 nt, Artificial Sequence
  Description of Artificial Sequence: Synthetic oligonucleotide
acgaaagagaagcucuaucucgccu

SEQ ID NO: 153457 - RNA, 25 nt, Artificial Sequence
  Description of Artificial Sequence: Synthetic oligonucleotide
cuccacaagcgccuucgguccaguu

SEQ ID NO: 153458 - RNA, 25 nt, Artificial Sequence
  Description of Artificial Sequence: Synthetic oligonucleotide
gagaagauuccaaagauguagccgc

SEQ ID NO: 153459 - RNA, 25 nt, Artificial Sequence
  Description of Artificial Sequence: Synthetic oligonucleotide
aaucuggauucaaugaggagacuug

SEQ ID NO: 153460 - RNA, 25 nt, Artificial Sequence
  Description of Artificial Sequence: Synthetic oligonucleotide
agaacagauuugagaguagugagga

SEQ ID NO: 153461 - RNA, 25 nt, Artificial Sequence
  Description of Artificial Sequence: Synthetic oligonucleotide
ccagagcugugcagaugaguacaaa

SEQ ID NO: 153462 - RNA, 25 nt, Artificial Sequence
  Description of Artificial Sequence: Synthetic oligonucleotide
ccucagauuguuguuguuaaugggc

SEQ ID NO: 153463 - RNA, 25 nt, Artificial Sequence
  Description of Artificial Sequence: Synthetic oligonucleotide
cuauuuuaauuauuuuuaauuuauu

SEQ ID NO: 153464 - RNA, 25 nt, Artificial Sequence
  Description of Artificial Sequence: Synthetic oligonucleotide
uuuaauuuauuaauauuuaaauaug

SEQ ID NO: 153465 - RNA, 25 nt, Artificial Sequence
  Description of Artificial Sequence: Synthetic oligonucleotide
augcaguuugaauauccuuuguuuc

SEQ ID NO: 153466 - RNA, 25 nt, Artificial Sequence
  Description of Artificial Sequence: Synthetic oligonucleotide
caugcugcuggcgucuaaguguuug

SEQ ID NO: 153467 - RNA, 25 nt, Artificial Sequence
  Description of Artificial Sequence: Synthetic oligonucleotide
agaugugcauuucaccugugacaaa

SEQ ID NO: 153468 - RNA, 25 nt, Artificial Sequence
  Description of Artificial Sequence: Synthetic oligonucleotide
ucaaaaccugugccaggcugaauua

SEQ ID NO: 153469 - RNA, 25 nt, Artificial Sequence
  Description of Artificial Sequence: Synthetic oligonucleotide
gaauguggguagucauucuuacaau

SEQ ID NO: 153470 - RNA, 25 nt, Artificial Sequence
  Description of Artificial Sequence: Synthetic oligonucleotide
auguggguagucauucuuacaauug

SEQ ID NO: 153471 - RNA, 25 nt, Artificial Sequence
  Description of Artificial Sequence: Synthetic oligonucleotide
ugaaaaugagcaucagagaguguac

SEQ ID NO: 153472 - RNA, 25 nt, Artificial Sequence
  Description of Artificial Sequence: Synthetic oligonucleotide
uugcuuuucauguagaacucagcag

SEQ ID NO: 153473 - RNA, 25 nt, Artificial Sequence
  Description of Artificial Sequence: Synthetic oligonucleotide
uguauuucuauauuuauuuucagua

SEQ ID NO: 153474 - RNA, 25 nt, Artificial Sequence
  Description of Artificial Sequence: Synthetic oligonucleotide
uuugauuaauguuucuuaaauggaa

SEQ ID NO: 153475 - RNA, 25 nt, Artificial Sequence
  Description of Artificial Sequence: Synthetic oligonucleotide
caacguguauagugccuaaaauugu

SEQ ID NO: 153476 - RNA, 25 nt, Artificial Sequence
  Description of Artificial Sequence: Synthetic oligonucleotide
cauauccuuggcuacuaacaucugg

SEQ ID NO: 153477 - RNA, 25 nt, Artificial Sequence
  Description of Artificial Sequence: Synthetic oligonucleotide
uacuaacaucuggagacugugagcu

SEQ ID NO: 153478 - RNA, 25 nt, Artificial Sequence
  Description of Artificial Sequence: Synthetic oligonucleotide
cauaaguugugugcuuuuuauuaau

SEQ ID NO: 153479 - RNA, 25 nt, Artificial Sequence
  Description of Artificial Sequence: Synthetic oligonucleotide
gcaucauuuuggcucuucuuacauu

SEQ ID NO: 153480 - RNA, 25 nt, Artificial Sequence
  Description of Artificial Sequence: Synthetic oligonucleotide
gcucuucuuacauuuguaaaaaugu

SEQ ID NO: 153481 - RNA, 25 nt, Artificial Sequence
  Description of Artificial Sequence: Synthetic oligonucleotide
agauuaggucaucuuaauucauauu

SEQ ID NO: 153482 - RNA, 25 nt, Artificial Sequence
  Description of Artificial Sequence: Synthetic oligonucleotide
auggaauugaaagaacuaaucauga

SEQ ID NO: 153483 - RNA, 25 nt, Artificial Sequence
  Description of Artificial Sequence: Synthetic oligonucleotide
cacacucauuccuucugcucuuggg

SEQ ID NO: 153484 - RNA, 25 nt, Artificial Sequence
  Description of Artificial Sequence: Synthetic oligonucleotide
uguagagguaaccaguagcuuugag

SEQ ID NO: 153485 - RNA, 25 nt, Artificial Sequence
  Description of Artificial Sequence: Synthetic oligonucleotide
caaccacaugccacguaauauuuca

SEQ ID NO: 153486 - RNA, 25 nt, Artificial Sequence
  Description of Artificial Sequence: Synthetic oligonucleotide
ucggaaacaaguuauucucuucacu

SEQ ID NO: 153487 - RNA, 25 nt, Artificial Sequence
  Description of Artificial Sequence: Synthetic oligonucleotide
acucccaauaacuaaugcuaagaaa

SEQ ID NO: 153488 - RNA, 25 nt, Artificial Sequence
  Description of Artificial Sequence: Synthetic oligonucleotide
aaugcuaagaaaugcugaaaaucaa

SEQ ID NO: 153489 - RNA, 25 nt, Artificial Sequence
  Description of Artificial Sequence: Synthetic oligonucleotide
gucuuucucuaaauaugauuacuuu

SEQ ID NO: 153490 - RNA, 25 nt, Artificial Sequence
  Description of Artificial Sequence: Synthetic oligonucleotide
ugaauuucaggcauuuuguucuaca

SEQ ID NO: 153491 - RNA, 25 nt, Artificial Sequence
  Description of Artificial Sequence: Synthetic oligonucleotide
cgauucccucucacccgggacucuc

SEQ ID NO: 153492 - RNA, 25 nt, Artificial Sequence
  Description of Artificial Sequence: Synthetic oligonucleotide
aggaaagugaaccuuuaaaguaaag

SEQ ID NO: 153493 - RNA, 25 nt, Artificial Sequence
  Description of Artificial Sequence: Synthetic oligonucleotide
gaggcugcaugcucuggaagccugg

SEQ ID NO: 153494 - RNA, 25 nt, Artificial Sequence
  Description of Artificial Sequence: Synthetic oligonucleotide
ucucugaacagaaaacaaaagagag

SEQ ID NO: 153495 - RNA, 25 nt, Artificial Sequence
  Description of Artificial Sequence: Synthetic oligonucleotide
aacuuggcuguaaucaguuaugccg

SEQ ID NO: 153496 - RNA, 25 nt, Artificial Sequence
  Description of Artificial Sequence: Synthetic oligonucleotide
agaagccaaaauuaaaagaagucca

SEQ ID NO: 153497 - RNA, 25 nt, Artificial Sequence
  Description of Artificial Sequence: Synthetic oligonucleotide
auuaaaagaaguccaggugagguua

SEQ ID NO: 153498 - RNA, 25 nt, Artificial Sequence
  Description of Artificial Sequence: Synthetic oligonucleotide
gaauccggauuaucgggaagaggac

SEQ ID NO: 153499 - RNA, 25 nt, Artificial Sequence
  Description of Artificial Sequence: Synthetic oligonucleotide
aaugugacaucaaagcaaguauugu

SEQ ID NO: 153500 - RNA, 25 nt, Artificial Sequence
  Description of Artificial Sequence: Synthetic oligonucleotide
caucaaagcaaguauuguagcacuc

SEQ ID NO: 153501 - RNA, 25 nt, Artificial Sequence
  Description of Artificial Sequence: Synthetic oligonucleotide
agagagagaaaacaaaaccacaaau

SEQ ID NO: 153502 - RNA, 25 nt, Artificial Sequence
  Description of Artificial Sequence: Synthetic oligonucleotide
ucgcuguaguauuuaagcccauaca

SEQ ID NO: 153503 - RNA, 25 nt, Artificial Sequence
  Description of Artificial Sequence: Synthetic oligonucleotide
cgcuguaguauuuaagcccauacag

SEQ ID NO: 153504 - RNA, 25 nt, Artificial Sequence
  Description of Artificial Sequence: Synthetic oligonucleotide
auuuaagcccauacagaaaccuucc

SEQ ID NO: 153505 - RNA, 25 nt, Artificial Sequence
  Description of Artificial Sequence: Synthetic oligonucleotide
auuaaaauaaacaugguauaccuac

SEQ ID NO: 153506 - RNA, 25 nt, Artificial Sequence
  Description of Artificial Sequence: Synthetic oligonucleotide
cuguucugaucggccaguuuucgga

SEQ ID NO: 153507 - RNA, 25 nt, Artificial Sequence
  Description of Artificial Sequence: Synthetic oligonucleotide
aaauaauuugaacuuuggaacaggg

SEQ ID NO: 153508 - RNA, 25 nt, Artificial Sequence
  Description of Artificial Sequence: Synthetic oligonucleotide
ugcgaccuuaauuuaacuuuccagu

SEQ ID NO: 153509 - RNA, 25 nt, Artificial Sequence
  Description of Artificial Sequence: Synthetic oligonucleotide
cugagaaagcuaaaguuugguuuug

SEQ ID NO: 153510 - RNA, 25 nt, Artificial Sequence
  Description of Artificial Sequence: Synthetic oligonucleotide
aguaaagaugcuacuucccacugua

SEQ ID NO: 153511 - RNA, 25 nt, Artificial Sequence
  Description of Artificial Sequence: Synthetic oligonucleotide
cugcuuaauugcugauaccauauga

SEQ ID NO: 153512 - RNA, 25 nt, Artificial Sequence
  Description of Artificial Sequence: Synthetic oligonucleotide
uaccauaugaaugaaacaugggcug

SEQ ID NO: 153513 - RNA, 25 nt, Artificial Sequence
  Description of Artificial Sequence: Synthetic oligonucleotide
aacuuucuuauccaacuuuuucaua

SEQ ID NO: 153514 - RNA, 25 nt, Artificial Sequence
  Description of Artificial Sequence: Synthetic oligonucleotide
ccuugcaugacaucaugaggccgga

SEQ ID NO: 153515 - RNA, 25 nt, Artificial Sequence
  Description of Artificial Sequence: Synthetic oligonucleotide
ugaauuuguauaugacugcauuugu

SEQ ID NO: 153516 - RNA, 25 nt, Artificial Sequence
  Description of Artificial Sequence: Synthetic oligonucleotide
gaauccuaguagaauguuuacuacc

SEQ ID NO: 153517 - RNA, 25 nt, Artificial Sequence
  Description of Artificial Sequence: Synthetic oligonucleotide
gaaagggaagaauuuuuugaugaaa

SEQ ID NO: 153518 - RNA, 25 nt, Artificial Sequence
  Description of Artificial Sequence: Synthetic oligonucleotide
uaucggcaugccagugugugaauuu

SEQ ID NO: 153519 - RNA, 25 nt, Artificial Sequence
  Description of Artificial Sequence: Synthetic oligonucleotide
caccucauaguagagcaauguaugu

SEQ ID NO: 153520 - RNA, 25 nt, Artificial Sequence
  Description of Artificial Sequence: Synthetic oligonucleotide
ccagaauugccaaagcacauauaua

SEQ ID NO: 153521 - RNA, 25 nt, Artificial Sequence
  Description of Artificial Sequence: Synthetic oligonucleotide
uggugaucuggguaauaguuucucc

SEQ ID NO: 153522 - RNA, 25 nt, Artificial Sequence
  Description of Artificial Sequence: Synthetic oligonucleotide
gaucuggguaauaguuucuccaaau

SEQ ID NO: 153523 - RNA, 25 nt, Artificial Sequence
  Description of Artificial Sequence: Synthetic oligonucleotide
ggaugugaugaauacuuccuagaaa

SEQ ID NO: 153524 - RNA, 25 nt, Artificial Sequence
  Description of Artificial Sequence: Synthetic oligonucleotide
cauuuccacagcuacaccauauaug

SEQ ID NO: 153525 - RNA, 25 nt, Artificial Sequence
  Description of Artificial Sequence: Synthetic oligonucleotide
acagcuacaccauauaugaauggag

SEQ ID NO: 153526 - RNA, 25 nt, Artificial Sequence
  Description of Artificial Sequence: Synthetic oligonucleotide
ugcaguucuuacacgagaagaagau

SEQ ID NO: 153527 - RNA, 25 nt, Artificial Sequence
  Description of Artificial Sequence: Synthetic oligonucleotide
acgagaagaagaucauuuacaggga

SEQ ID NO: 153528 - RNA, 25 nt, Artificial Sequence
  Description of Artificial Sequence: Synthetic oligonucleotide
cgagaagaagaucauuuacagggac

SEQ ID NO: 153529 - RNA, 25 nt, Artificial Sequence
  Description of Artificial Sequence: Synthetic oligonucleotide
aagaagaucauuuacagggaccuga

SEQ ID NO: 153530 - RNA, 25 nt, Artificial Sequence
  Description of Artificial Sequence: Synthetic oligonucleotide
agaggaagagguguuugacugcauc

SEQ ID NO: 153531 - RNA, 25 nt, Artificial Sequence
  Description of Artificial Sequence: Synthetic oligonucleotide
gaggaagagguguuugacugcaucg

SEQ ID NO: 153532 - RNA, 25 nt, Artificial Sequence
  Description of Artificial Sequence: Synthetic oligonucleotide
cuacuuugagggcgaguucacaggg

SEQ ID NO: 153533 - RNA, 25 nt, Artificial Sequence
  Description of Artificial Sequence: Synthetic oligonucleotide
agggcaucuccuggcaccucugucc

SEQ ID NO: 153534 - RNA, 25 nt, Artificial Sequence
  Description of Artificial Sequence: Synthetic oligonucleotide
ggagugauaugguuugucuuuuuaa

SEQ ID NO: 153535 - RNA, 25 nt, Artificial Sequence
  Description of Artificial Sequence: Synthetic oligonucleotide
gagugauaugguuugucuuuuuaag

SEQ ID NO: 153536 - RNA, 25 nt, Artificial Sequence
  Description of Artificial Sequence: Synthetic oligonucleotide
ugcaguaaagauccuaaagguuguc

SEQ ID NO: 153537 - RNA, 25 nt, Artificial Sequence
  Description of Artificial Sequence: Synthetic oligonucleotide
aguaaagauccuaaagguugucgac

SEQ ID NO: 153538 - RNA, 25 nt, Artificial Sequence
  Description of Artificial Sequence: Synthetic oligonucleotide
ugacaaaggacaaccuggcaauugu

SEQ ID NO: 153539 - RNA, 25 nt, Artificial Sequence
  Description of Artificial Sequence: Synthetic oligonucleotide
gcaauugugacccaguggugcgagg

SEQ ID NO: 153540 - RNA, 25 nt, Artificial Sequence
  Description of Artificial Sequence: Synthetic oligonucleotide
aacaucauccauagagacaugaaau

SEQ ID NO: 153541 - RNA, 25 nt, Artificial Sequence
  Description of Artificial Sequence: Synthetic oligonucleotide
ugaaauccaacaauauauuucucca

SEQ ID NO: 153542 - RNA, 25 nt, Artificial Sequence
  Description of Artificial Sequence: Synthetic oligonucleotide
aacaauauauuucuccaugaaggcu

SEQ ID NO: 153543 - RNA, 25 nt, Artificial Sequence
  Description of Artificial Sequence: Synthetic oligonucleotide
aacaguaaagucacgcuggaguggu

SEQ ID NO: 153544 - RNA, 25 nt, Artificial Sequence
  Description of Artificial Sequence: Synthetic oligonucleotide
ugugaagaaaguaaaggaagagagg

SEQ ID NO: 153545 - RNA, 25 nt, Artificial Sequence
  Description of Artificial Sequence: Synthetic oligonucleotide
cuuccgagccauccuugcaucgggc

SEQ ID NO: 153546 - RNA, 25 nt, Artificial Sequence
  Description of Artificial Sequence: Synthetic oligonucleotide
aauggagguugaauauccuacugug

SEQ ID NO: 153547 - RNA, 25 nt, Artificial Sequence
  Description of Artificial Sequence: Synthetic oligonucleotide
ggagguugaauauccuacuguguaa

SEQ ID NO: 153548 - RNA, 25 nt, Artificial Sequence
  Description of Artificial Sequence: Synthetic oligonucleotide
auuuugaguuuucccuuguagugua

SEQ ID NO: 153549 - RNA, 25 nt, Artificial Sequence
  Description of Artificial Sequence: Synthetic oligonucleotide
uauccuguuuguucuuuguugauug

SEQ ID NO: 153550 - RNA, 25 nt, Artificial Sequence
  Description of Artificial Sequence: Synthetic oligonucleotide
ccuguuuguucuuuguugauugaaa

SEQ ID NO: 153551 - RNA, 25 nt, Artificial Sequence
  Description of Artificial Sequence: Synthetic oligonucleotide
cucuacagccuucuuuuucuuccau

SEQ ID NO: 153552 - RNA, 25 nt, Artificial Sequence
  Description of Artificial Sequence: Synthetic oligonucleotide
ucuuccauagcuaaucuuccuucua

SEQ ID NO: 153553 - RNA, 25 nt, Artificial Sequence
  Description of Artificial Sequence: Synthetic oligonucleotide
auaaucuuccuguugaaugcuucau

SEQ ID NO: 153554 - RNA, 25 nt, Artificial Sequence
  Description of Artificial Sequence: Synthetic oligonucleotide
uaaucuuccuguugaaugcuucaug

SEQ ID NO: 153555 - RNA, 25 nt, Artificial Sequence
  Description of Artificial Sequence: Synthetic oligonucleotide
cuucaugacuugaauucuacuuuga

SEQ ID NO: 153556 - RNA, 25 nt, Artificial Sequence
  Description of Artificial Sequence: Synthetic oligonucleotide
aagagggagagaagcaacuacagac

SEQ ID NO: 153557 - RNA, 25 nt, Artificial Sequence
  Description of Artificial Sequence: Synthetic oligonucleotide
cgucuccuaccagaccaaggucaac

SEQ ID NO: 153558 - RNA, 25 nt, Artificial Sequence
  Description of Artificial Sequence: Synthetic oligonucleotide
gaucaaucggcccgacuaucucgac

SEQ ID NO: 153559 - RNA, 25 nt, Artificial Sequence
  Description of Artificial Sequence: Synthetic oligonucleotide
ggacgaacauccaaccuucccaaac

SEQ ID NO: 153560 - RNA, 25 nt, Artificial Sequence
  Description of Artificial Sequence: Synthetic oligonucleotide
agggucggaacccaagcuuagaacu

SEQ ID NO: 153561 - RNA, 25 nt, Artificial Sequence
  Description of Artificial Sequence: Synthetic oligonucleotide
ucggaacccaagcuuagaacuuuaa

SEQ ID NO: 153562 - RNA, 25 nt, Artificial Sequence
  Description of Artificial Sequence: Synthetic oligonucleotide
acccaagcuuagaacuuuaagcaac

SEQ ID NO: 153563 - RNA, 25 nt, Artificial Sequence
  Description of Artificial Sequence: Synthetic oligonucleotide
gaacuuuaagcaacaagaccaccac

SEQ ID NO: 153564 - RNA, 25 nt, Artificial Sequence
  Description of Artificial Sequence: Synthetic oligonucleotide
acuauucaguggcgagaaauaaagu

SEQ ID NO: 153565 - RNA, 25 nt, Artificial Sequence
  Description of Artificial Sequence: Synthetic oligonucleotide
cuauucaguggcgagaaauaaaguu

SEQ ID NO: 153566 - RNA, 25 nt, Artificial Sequence
  Description of Artificial Sequence: Synthetic oligonucleotide
aaacacagauaacaggaaaugaucc

SEQ ID NO: 153567 - RNA, 25 nt, Artificial Sequence
  Description of Artificial Sequence: Synthetic oligonucleotide
cuuaagaaaagagaagaaaugaaac

SEQ ID NO: 153568 - RNA, 25 nt, Artificial Sequence
  Description of Artificial Sequence: Synthetic oligonucleotide
cugaaggaguguguuuccauccucc

SEQ ID NO: 153569 - RNA, 25 nt, Artificial Sequence
  Description of Artificial Sequence: Synthetic oligonucleotide
ucaccgcgggacugaaaaucuuuga

SEQ ID NO: 153570 - RNA, 25 nt, Artificial Sequence
  Description of Artificial Sequence: Synthetic oligonucleotide
agcagaaauaagcgugccguucagg

SEQ ID NO: 153571 - RNA, 25 nt, Artificial Sequence
  Description of Artificial Sequence: Synthetic oligonucleotide
aagcgugccguucaggguccagaag

SEQ ID NO: 153572 - RNA, 25 nt, Artificial Sequence
  Description of Artificial Sequence: Synthetic oligonucleotide
agaaacagucacucaagacugcuug

SEQ ID NO: 153573 - RNA, 25 nt, Artificial Sequence
  Description of Artificial Sequence: Synthetic oligonucleotide
agaggaagaagguccaugucuuugg

SEQ ID NO: 153574 - RNA, 25 nt, Artificial Sequence
  Description of Artificial Sequence: Synthetic oligonucleotide
uguauucaaaauaugccugaaacac

SEQ ID NO: 153575 - RNA, 25 nt, Artificial Sequence
  Description of Artificial Sequence: Synthetic oligonucleotide
auuuuccucccuuucucuguaccuc

SEQ ID NO: 153576 - RNA, 25 nt, Artificial Sequence
  Description of Artificial Sequence: Synthetic oligonucleotide
caaagaaagauagagcaagacaaga

SEQ ID NO: 153577 - RNA, 25 nt, Artificial Sequence
  Description of Artificial Sequence: Synthetic oligonucleotide
aagaaagauagagcaagacaagaaa

SEQ ID NO: 153578 - RNA, 25 nt, Artificial Sequence
  Description of Artificial Sequence: Synthetic oligonucleotide
gaaagcauuuguuuguacaagaucc

SEQ ID NO: 153579 - RNA, 25 nt, Artificial Sequence
  Description of Artificial Sequence: Synthetic oligonucleotide
ugaguuaaacgaacguacuugcaga

SEQ ID NO: 153580 - RNA, 25 nt, Artificial Sequence
  Description of Artificial Sequence: Synthetic oligonucleotide
acugauacagaacgaucgauacaga

SEQ ID NO: 153581 - RNA, 25 nt, Artificial Sequence
  Description of Artificial Sequence: Synthetic oligonucleotide
auauuauauauauauaaaaauaaau

SEQ ID NO: 153582 - RNA, 25 nt, Artificial Sequence
  Description of Artificial Sequence: Synthetic oligonucleotide
auuauauauauauaaaaauaaauau

SEQ ID NO: 153583 - RNA, 25 nt, Artificial Sequence
  Description of Artificial Sequence: Synthetic oligonucleotide
ucacuggauguauuugacugcugug

SEQ ID NO: 153584 - RNA, 25 nt, Artificial Sequence
  Description of Artificial Sequence: Synthetic oligonucleotide
cagggaagaggaggagaugagagac

SEQ ID NO: 153585 - RNA, 25 nt, Artificial Sequence
  Description of Artificial Sequence: Synthetic oligonucleotide
augaucuuuuuuuugucccacuugg

SEQ ID NO: 153586 - RNA, 27 nt, Artificial Sequence
  Description of Artificial Sequence: Synthetic oligonucleotide
ggccgugaacuccucaucaaaauaccu

SEQ ID NO: 153587 - RNA, 27 nt, Artificial Sequence
  Description of Artificial Sequence: Synthetic oligonucleotide
uggugugauggugaucaucugggccgu

SEQ ID NO: 153588 - RNA, 27 nt, Artificial Sequence
  Description of Artificial Sequence: Synthetic oligonucleotide
aaacccgcaggauaguuuucuucccua

SEQ ID NO: 153589 - RNA, 27 nt, Artificial Sequence
  Description of Artificial Sequence: Synthetic oligonucleotide
caaacuggaugaaauaaauuaaaaccc

SEQ ID NO: 153590 - RNA, 27 nt, Artificial Sequence
  Description of Artificial Sequence: Synthetic oligonucleotide
agaaguccuuaacauuucccuacguga

SEQ ID NO: 153591 - RNA, 27 nt, Artificial Sequence
  Description of Artificial Sequence: Synthetic oligonucleotide
cucugucccacuggguaaacccuggcc

SEQ ID NO: 153592 - RNA, 27 nt, Artificial Sequence
  Description of Artificial Sequence: Synthetic oligonucleotide
cacaauaacaaauuuaaaccuugcucc

SEQ ID NO: 153593 - RNA, 27 nt, Artificial Sequence
  Description of Artificial Sequence: Synthetic oligonucleotide
aaaugcauuugaacaacauaauacaca

SEQ ID NO: 153594 - RNA, 27 nt, Artificial Sequence
  Description of Artificial Sequence: Synthetic oligonucleotide
ggcuuuccugucacaaagauuaaaaac

SEQ ID NO: 153595 - RNA, 27 nt, Artificial Sequence
  Description of Artificial Sequence: Synthetic oligonucleotide
agggcuuuccugucacaaagauuaaaa

SEQ ID NO: 153596 - RNA, 27 nt, Artificial Sequence
  Description of Artificial Sequence: Synthetic oligonucleotide
ggccaugcugggagacauaagcagcag

SEQ ID NO: 153597 - RNA, 27 nt, Artificial Sequence
  Description of Artificial Sequence: Synthetic oligonucleotide
ucagggagaagcuucugaaacacuucu

SEQ ID NO: 153598 - RNA, 27 nt, Artificial Sequence
  Description of Artificial Sequence: Synthetic oligonucleotide
aagggcuucuuccuuauugauggucag

SEQ ID NO: 153599 - RNA, 27 nt, Artificial Sequence
  Description of Artificial Sequence: Synthetic oligonucleotide
ugaagggcuucuuccuuauugaugguc

SEQ ID NO: 153600 - RNA, 27 nt, Artificial Sequence
  Description of Artificial Sequence: Synthetic oligonucleotide
cgcugaagggcuucuuccuuauugaug

SEQ ID NO: 153601 - RNA, 27 nt, Artificial Sequence
  Description of Artificial Sequence: Synthetic oligonucleotide
gccgcugaagggcuucuuccuuauuga

SEQ ID NO: 153602 - RNA, 27 nt, Artificial Sequence
  Description of Artificial Sequence: Synthetic oligonucleotide
acuggccgcugaagggcuucuuccuua

SEQ ID NO: 153603 - RNA, 27 nt, Artificial Sequence
  Description of Artificial Sequence: Synthetic oligonucleotide
cggagcuuuucaccuuuaguuaugcuu

SEQ ID NO: 153604 - RNA, 27 nt, Artificial Sequence
  Description of Artificial Sequence: Synthetic oligonucleotide
ccggagcuuuucaccuuuaguuaugcu

SEQ ID NO: 153605 - RNA, 27 nt, Artificial Sequence
  Description of Artificial Sequence: Synthetic oligonucleotide
cagacuguugacuggcgugauguaguu

SEQ ID NO: 153606 - RNA, 27 nt, Artificial Sequence
  Description of Artificial Sequence: Synthetic oligonucleotide
cuuuugaacucugcuuaaauccagugg

SEQ ID NO: 153607 - RNA, 27 nt, Artificial Sequence
  Description of Artificial Sequence: Synthetic oligonucleotide
gcuuuugaacucugcuuaaauccagug

SEQ ID NO: 153608 - RNA, 27 nt, Artificial Sequence
  Description of Artificial Sequence: Synthetic oligonucleotide
agggcuuuugaacucugcuuaaaucca

SEQ ID NO: 153609 - RNA, 27 nt, Artificial Sequence
  Description of Artificial Sequence: Synthetic oligonucleotide
aagggcuuuugaacucugcuuaaaucc

SEQ ID NO: 153610 - RNA, 27 nt, Artificial Sequence
  Description of Artificial Sequence: Synthetic oligonucleotide
ugaagggcuuuugaacucugcuuaaau

SEQ ID NO: 153611 - RNA, 27 nt, Artificial Sequence
  Description of Artificial Sequence: Synthetic oligonucleotide
cugaagggcuuuugaacucugcuuaaa

SEQ ID NO: 153612 - RNA, 27 nt, Artificial Sequence
  Description of Artificial Sequence: Synthetic oligonucleotide
cgcugaagggcuuuugaacucugcuua

SEQ ID NO: 153613 - RNA, 27 nt, Artificial Sequence
  Description of Artificial Sequence: Synthetic oligonucleotide
cgagcggcuucacucagacccugaggc

SEQ ID NO: 153614 - RNA, 27 nt, Artificial Sequence
  Description of Artificial Sequence: Synthetic oligonucleotide
uugacuggcgugauguaguugcuuggg

SEQ ID NO: 153615 - RNA, 27 nt, Artificial Sequence
  Description of Artificial Sequence: Synthetic oligonucleotide
cacgcaccaagaagcugccauugaucc

SEQ ID NO: 153616 - RNA, 27 nt, Artificial Sequence
  Description of Artificial Sequence: Synthetic oligonucleotide
cugaugaauccaaugugggcuggaauc

SEQ ID NO: 153617 - RNA, 27 nt, Artificial Sequence
  Description of Artificial Sequence: Synthetic oligonucleotide
cuuagguauuccacauucucagcugug

SEQ ID NO: 153618 - RNA, 27 nt, Artificial Sequence
  Description of Artificial Sequence: Synthetic oligonucleotide
ugagccucaaauuaggagauacguuuu

SEQ ID NO: 153619 - RNA, 27 nt, Artificial Sequence
  Description of Artificial Sequence: Synthetic oligonucleotide
ccaauuguagagaaauuauuuuaggaa

SEQ ID NO: 153620 - RNA, 27 nt, Artificial Sequence
  Description of Artificial Sequence: Synthetic oligonucleotide
ggcuccuaacuagcugaaucuuccaau

SEQ ID NO: 153621 - RNA, 27 nt, Artificial Sequence
  Description of Artificial Sequence: Synthetic oligonucleotide
guggauauugacuaggagaguuuaaaa

SEQ ID NO: 153622 - RNA, 27 nt, Artificial Sequence
  Description of Artificial Sequence: Synthetic oligonucleotide
ugugacugaacauaacuguaggcugaa

SEQ ID NO: 153623 - RNA, 27 nt, Artificial Sequence
  Description of Artificial Sequence: Synthetic oligonucleotide
guaugugugugugacugaacauaacug

SEQ ID NO: 153624 - RNA, 27 nt, Artificial Sequence
  Description of Artificial Sequence: Synthetic oligonucleotide
aagcaaaaggaacauuuuguaugugug

SEQ ID NO: 153625 - RNA, 27 nt, Artificial Sequence
  Description of Artificial Sequence: Synthetic oligonucleotide
aaaaauuacuuuaaaagcaaaaggaac

SEQ ID NO: 153626 - RNA, 27 nt, Artificial Sequence
  Description of Artificial Sequence: Synthetic oligonucleotide
ccauugacuguugcuucacaggucaga

SEQ ID NO: 153627 - RNA, 27 nt, Artificial Sequence
  Description of Artificial Sequence: Synthetic oligonucleotide
auugguuugucgaugugugagauaguu

SEQ ID NO: 153628 - RNA, 27 nt, Artificial Sequence
  Description of Artificial Sequence: Synthetic oligonucleotide
agugguagcaguacaauugaggacaag

SEQ ID NO: 153629 - RNA, 27 nt, Artificial Sequence
  Description of Artificial Sequence: Synthetic oligonucleotide
uaagaccgcuugccagcuacgguuuca

SEQ ID NO: 153630 - RNA, 27 nt, Artificial Sequence
  Description of Artificial Sequence: Synthetic oligonucleotide
agccgguaagaccgcuugccagcuacg

SEQ ID NO: 153631 - RNA, 27 nt, Artificial Sequence
  Description of Artificial Sequence: Synthetic oligonucleotide
gguaacccaucuuuuaaccauacaacu

SEQ ID NO: 153632 - RNA, 27 nt, Artificial Sequence
  Description of Artificial Sequence: Synthetic oligonucleotide
ucgcagguaacccaucuuuuaaccaua

SEQ ID NO: 153633 - RNA, 27 nt, Artificial Sequence
  Description of Artificial Sequence: Synthetic oligonucleotide
cucagcaagauuguauaauucccugca

SEQ ID NO: 153634 - RNA, 27 nt, Artificial Sequence
  Description of Artificial Sequence: Synthetic oligonucleotide
acuguuuuaugcucagcaagauuguau

SEQ ID NO: 153635 - RNA, 27 nt, Artificial Sequence
  Description of Artificial Sequence: Synthetic oligonucleotide
aggauaaaggacucuucauuauuggaa

SEQ ID NO: 153636 - RNA, 27 nt, Artificial Sequence
  Description of Artificial Sequence: Synthetic oligonucleotide
caacuugcguuggaacauccaaagugu

SEQ ID NO: 153637 - RNA, 27 nt, Artificial Sequence
  Description of Artificial Sequence: Synthetic oligonucleotide
augguuucaguuuaguggaagcauuua

SEQ ID NO: 153638 - RNA, 27 nt, Artificial Sequence
  Description of Artificial Sequence: Synthetic oligonucleotide
auauuuaacaaagucaaacuuucucac

SEQ ID NO: 153639 - RNA, 27 nt, Artificial Sequence
  Description of Artificial Sequence: Synthetic oligonucleotide
aacuuuuaauauacaguaguucuuuuc

SEQ ID NO: 153640 - RNA, 27 nt, Artificial Sequence
  Description of Artificial Sequence: Synthetic oligonucleotide
guuaagucaaaacccguauuucuaaag

SEQ ID NO: 153641 - RNA, 27 nt, Artificial Sequence
  Description of Artificial Sequence: Synthetic oligonucleotide
gugcugaguuugcuguacccauguuga

SEQ ID NO: 153642 - RNA, 27 nt, Artificial Sequence
  Description of Artificial Sequence: Synthetic oligonucleotide
ugaggucagcaucuucugugucuuuac

SEQ ID NO: 153643 - RNA, 27 nt, Artificial Sequence
  Description of Artificial Sequence: Synthetic oligonucleotide
gcgaucugaauaaaccucccuacuagc

SEQ ID NO: 153644 - RNA, 27 nt, Artificial Sequence
  Description of Artificial Sequence: Synthetic oligonucleotide
aucccagaacccugcugcagaaggcca

SEQ ID NO: 153645 - RNA, 27 nt, Artificial Sequence
  Description of Artificial Sequence: Synthetic oligonucleotide
cauaauuuccaauauguaccagaccuu

SEQ ID NO: 153646 - RNA, 27 nt, Artificial Sequence
  Description of Artificial Sequence: Synthetic oligonucleotide
cuagugcuuccaucggaaggacuaggu

SEQ ID NO: 153647 - RNA, 27 nt, Artificial Sequence
  Description of Artificial Sequence: Synthetic oligonucleotide
uccacauaaaaacaauauucacuggga

SEQ ID NO: 153648 - RNA, 27 nt, Artificial Sequence
  Description of Artificial Sequence: Synthetic oligonucleotide
ucuaccaauuccaacuugaauucauug

SEQ ID NO: 153649 - RNA, 27 nt, Artificial Sequence
  Description of Artificial Sequence: Synthetic oligonucleotide
ucuccaagucuaaaucuguguccugag

SEQ ID NO: 153650 - RNA, 27 nt, Artificial Sequence
  Description of Artificial Sequence: Synthetic oligonucleotide
uggaauacuguaacugugcuuugagga

SEQ ID NO: 153651 - RNA, 27 nt, Artificial Sequence
  Description of Artificial Sequence: Synthetic oligonucleotide
uuaauucaucagugguggcagugguag

SEQ ID NO: 153652 - RNA, 27 nt, Artificial Sequence
  Description of Artificial Sequence: Synthetic oligonucleotide
gugaugauguggcacuaguaguuucuu

SEQ ID NO: 153653 - RNA, 27 nt, Artificial Sequence
  Description of Artificial Sequence: Synthetic oligonucleotide
ucuguuuggugaggcuguccgacuuug

SEQ ID NO: 153654 - RNA, 27 nt, Artificial Sequence
  Description of Artificial Sequence: Synthetic oligonucleotide
ccaucauguuccauuuuucgcuuucuc

SEQ ID NO: 153655 - RNA, 27 nt, Artificial Sequence
  Description of Artificial Sequence: Synthetic oligonucleotide
gcagucuacaugcuaaaucagagggua

SEQ ID NO: 153656 - RNA, 27 nt, Artificial Sequence
  Description of Artificial Sequence: Synthetic oligonucleotide
cauaaauagauccuuaaauagcucaaa

SEQ ID NO: 153657 - RNA, 27 nt, Artificial Sequence
  Description of Artificial Sequence: Synthetic oligonucleotide
ugauaauagugcuuuuucaccuuuuuc

SEQ ID NO: 153658 - RNA, 27 nt, Artificial Sequence
  Description of Artificial Sequence: Synthetic oligonucleotide
gcagaacugauaauagugcuuuuucac

SEQ ID NO: 153659 - RNA, 27 nt, Artificial Sequence
  Description of Artificial Sequence: Synthetic oligonucleotide
guagguuuaaucuuucuuuucagccau

SEQ ID NO: 153660 - RNA, 27 nt, Artificial Sequence
  Description of Artificial Sequence: Synthetic oligonucleotide
agaaggauuuuauuauaaggguuuaau

SEQ ID NO: 153661 - RNA, 27 nt, Artificial Sequence
  Description of Artificial Sequence: Synthetic oligonucleotide
gucuacagcauuggcuaauaguaugaa

SEQ ID NO: 153662 - RNA, 27 nt, Artificial Sequence
  Description of Artificial Sequence: Synthetic oligonucleotide
cuauuccuaucaaaaugcuucugucua

SEQ ID NO: 153663 - RNA, 27 nt, Artificial Sequence
  Description of Artificial Sequence: Synthetic oligonucleotide
ucagggccauuaucuuauuugcucuau

SEQ ID NO: 153664 - RNA, 27 nt, Artificial Sequence
  Description of Artificial Sequence: Synthetic oligonucleotide
ugcuugaggaagagaaaaauguugguc

SEQ ID NO: 153665 - RNA, 27 nt, Artificial Sequence
  Description of Artificial Sequence: Synthetic oligonucleotide
ugggcugaacuuuucucauacuuaaag

SEQ ID NO: 153666 - RNA, 27 nt, Artificial Sequence
  Description of Artificial Sequence: Synthetic oligonucleotide
gguucagcagccaucuuuauuccugcg

SEQ ID NO: 153667 - RNA, 27 nt, Artificial Sequence
  Description of Artificial Sequence: Synthetic oligonucleotide
ugaagagaacuuggucauucaaauuuc

SEQ ID NO: 153668 - RNA, 27 nt, Artificial Sequence
  Description of Artificial Sequence: Synthetic oligonucleotide
cucuaggcuggcuaucuuuauacauac

SEQ ID NO: 153669 - RNA, 27 nt, Artificial Sequence
  Description of Artificial Sequence: Synthetic oligonucleotide
acacuucacagagauaguuacagccau

SEQ ID NO: 153670 - RNA, 27 nt, Artificial Sequence
  Description of Artificial Sequence: Synthetic oligonucleotide
uugaaauuuucucacacuucacagaga

SEQ ID NO: 153671 - RNA, 27 nt, Artificial Sequence
  Description of Artificial Sequence: Synthetic oligonucleotide
ucaggaggauucauuuccuuaaaggaa

SEQ ID NO: 153672 - RNA, 27 nt, Artificial Sequence
  Description of Artificial Sequence: Synthetic oligonucleotide
auaugaugucacuuuuuguauccuuga

SEQ ID NO: 153673 - RNA, 27 nt, Artificial Sequence
  Description of Artificial Sequence: Synthetic oligonucleotide
uaugaugaagauucaaauugcaucuua

SEQ ID NO: 153674 - RNA, 27 nt, Artificial Sequence
  Description of Artificial Sequence: Synthetic oligonucleotide
uuaauagcuagucuucguuuugaacag

SEQ ID NO: 153675 - RNA, 27 nt, Artificial Sequence
  Description of Artificial Sequence: Synthetic oligonucleotide
auuuuuaguagagaugagguuucacca

SEQ ID NO: 153676 - RNA, 27 nt, Artificial Sequence
  Description of Artificial Sequence: Synthetic oligonucleotide
aggcgagauagagcuucucuuucguuc

SEQ ID NO: 153677 - RNA, 27 nt, Artificial Sequence
  Description of Artificial Sequence: Synthetic oligonucleotide
aacuggaccgaaggcgcuuguggagaa

SEQ ID NO: 153678 - RNA, 27 nt, Artificial Sequence
  Description of Artificial Sequence: Synthetic oligonucleotide
gcggcuacaucuuuggaaucuucuccu

SEQ ID NO: 153679 - RNA, 27 nt, Artificial Sequence
  Description of Artificial Sequence: Synthetic oligonucleotide
caagucuccucauugaauccagauugg

SEQ ID NO: 153680 - RNA, 27 nt, Artificial Sequence
  Description of Artificial Sequence: Synthetic oligonucleotide
uccucacuacucucaaaucuguucugg

SEQ ID NO: 153681 - RNA, 27 nt, Artificial Sequence
  Description of Artificial Sequence: Synthetic oligonucleotide
uuuguacucaucugcacagcucuggcu

SEQ ID NO: 153682 - RNA, 27 nt, Artificial Sequence
  Description of Artificial Sequence: Synthetic oligonucleotide
gcccauuaacaacaacaaucugaggug

SEQ ID NO: 153683 - RNA, 27 nt, Artificial Sequence
  Description of Artificial Sequence: Synthetic oligonucleotide
aauaaauuaaaaauaauuaaaauagug

SEQ ID NO: 153684 - RNA, 27 nt, Artificial Sequence
  Description of Artificial Sequence: Synthetic oligonucleotide
cauauuuaaauauuaauaaauuaaaaa

SEQ ID NO: 153685 - RNA, 27 nt, Artificial Sequence
  Description of Artificial Sequence: Synthetic oligonucleotide
gaaacaaaggauauucaaacugcauag

SEQ ID NO: 153686 - RNA, 27 nt, Artificial Sequence
  Description of Artificial Sequence: Synthetic oligonucleotide
caaacacuuagacgccagcagcauggg

SEQ ID NO: 153687 - RNA, 27 nt, Artificial Sequence
  Description of Artificial Sequence: Synthetic oligonucleotide
uuugucacaggugaaaugcacaucuga

SEQ ID NO: 153688 - RNA, 27 nt, Artificial Sequence
  Description of Artificial Sequence: Synthetic oligonucleotide
uaauucagccuggcacagguuuugauc

SEQ ID NO: 153689 - RNA, 27 nt, Artificial Sequence
  Description of Artificial Sequence: Synthetic oligonucleotide
auuguaagaaugacuacccacauucac

SEQ ID NO: 153690 - RNA, 27 nt, Artificial Sequence
  Description of Artificial Sequence: Synthetic oligonucleotide
caauuguaagaaugacuacccacauuc

SEQ ID NO: 153691 - RNA, 27 nt, Artificial Sequence
  Description of Artificial Sequence: Synthetic oligonucleotide
guacacucucugaugcucauuuucaua

SEQ ID NO: 153692 - RNA, 27 nt, Artificial Sequence
  Description of Artificial Sequence: Synthetic oligonucleotide
cugcugaguucuacaugaaaagcaaau

SEQ ID NO: 153693 - RNA, 27 nt, Artificial Sequence
  Description of Artificial Sequence: Synthetic oligonucleotide
uacugaaaauaaauauagaaauacaac

SEQ ID NO: 153694 - RNA, 27 nt, Artificial Sequence
  Description of Artificial Sequence: Synthetic oligonucleotide
uuccauuuaagaaacauuaaucaaaac

SEQ ID NO: 153695 - RNA, 27 nt, Artificial Sequence
  Description of Artificial Sequence: Synthetic oligonucleotide
acaauuuuaggcacuauacacguuguu

SEQ ID NO: 153696 - RNA, 27 nt, Artificial Sequence
  Description of Artificial Sequence: Synthetic oligonucleotide
ccagauguuaguagccaaggauauggu

SEQ ID NO: 153697 - RNA, 27 nt, Artificial Sequence
  Description of Artificial Sequence: Synthetic oligonucleotide
agcucacagucuccagauguuaguagc

SEQ ID NO: 153698 - RNA, 27 nt, Artificial Sequence
  Description of Artificial Sequence: Synthetic oligonucleotide
auuaauaaaaagcacacaacuuauggc

SEQ ID NO: 153699 - RNA, 27 nt, Artificial Sequence
  Description of Artificial Sequence: Synthetic oligonucleotide
aauguaagaagagccaaaaugaugcau

SEQ ID NO: 153700 - RNA, 27 nt, Artificial Sequence
  Description of Artificial Sequence: Synthetic oligonucleotide
acauuuuuacaaauguaagaagagcca

SEQ ID NO: 153701 - RNA, 27 nt, Artificial Sequence
  Description of Artificial Sequence: Synthetic oligonucleotide
aauaugaauuaagaugaccuaaucugu

SEQ ID NO: 153702 - RNA, 27 nt, Artificial Sequence
  Description of Artificial Sequence: Synthetic oligonucleotide
ucaugauuaguucuuucaauuccaucc

SEQ ID NO: 153703 - RNA, 27 nt, Artificial Sequence
  Description of Artificial Sequence: Synthetic oligonucleotide
cccaagagcagaaggaaugagugugca

SEQ ID NO: 153704 - RNA, 27 nt, Artificial Sequence
  Description of Artificial Sequence: Synthetic oligonucleotide
cucaaagcuacugguuaccucuacacc

SEQ ID NO: 153705 - RNA, 27 nt, Artificial Sequence
  Description of Artificial Sequence: Synthetic oligonucleotide
ugaaauauuacguggcaugugguuggg

SEQ ID NO: 153706 - RNA, 27 nt, Artificial Sequence
  Description of Artificial Sequence: Synthetic oligonucleotide
agugaagagaauaacuuguuuccgaag

SEQ ID NO: 153707 - RNA, 27 nt, Artificial Sequence
  Description of Artificial Sequence: Synthetic oligonucleotide
uuucuuagcauuaguuauugggaguga

SEQ ID NO: 153708 - RNA, 27 nt, Artificial Sequence
  Description of Artificial Sequence: Synthetic oligonucleotide
uugauuuucagcauuucuuagcauuag

SEQ ID NO: 153709 - RNA, 27 nt, Artificial Sequence
  Description of Artificial Sequence: Synthetic oligonucleotide
aaaguaaucauauuuagagaaagacag

SEQ ID NO: 153710 - RNA, 27 nt, Artificial Sequence
  Description of Artificial Sequence: Synthetic oligonucleotide
uguagaacaaaaugccugaaauucagc

SEQ ID NO: 153711 - RNA, 27 nt, Artificial Sequence
  Description of Artificial Sequence: Synthetic oligonucleotide
gagagucccgggugagagggaaucgcc

SEQ ID NO: 153712 - RNA, 27 nt, Artificial Sequence
  Description of Artificial Sequence: Synthetic oligonucleotide
cuuuacuuuaaagguucacuuuccuug

SEQ ID NO: 153713 - RNA, 27 nt, Artificial Sequence
  Description of Artificial Sequence: Synthetic oligonucleotide
ccaggcuuccagagcaugcagccuccu

SEQ ID NO: 153714 - RNA, 27 nt, Artificial Sequence
  Description of Artificial Sequence: Synthetic oligonucleotide
cucucuuuuguuuucuguucagagaaa

SEQ ID NO: 153715 - RNA, 27 nt, Artificial Sequence
  Description of Artificial Sequence: Synthetic oligonucleotide
cggcauaacugauuacagccaaguuca

SEQ ID NO: 153716 - RNA, 27 nt, Artificial Sequence
  Description of Artificial Sequence: Synthetic oligonucleotide
uggacuucuuuuaauuuuggcuucuuc

SEQ ID NO: 153717 - RNA, 27 nt, Artificial Sequence
  Description of Artificial Sequence: Synthetic oligonucleotide
uaaccucaccuggacuucuuuuaauuu

SEQ ID NO: 153718 - RNA, 27 nt, Artificial Sequence
  Description of Artificial Sequence: Synthetic oligonucleotide
guccucuucccgauaauccggauucag

SEQ ID NO: 153719 - RNA, 27 nt, Artificial Sequence
  Description of Artificial Sequence: Synthetic oligonucleotide
acaauacuugcuuugaugucacauuaa

SEQ ID NO: 153720 - RNA, 27 nt, Artificial Sequence
  Description of Artificial Sequence: Synthetic oligonucleotide
gagugcuacaauacuugcuuugauguc

SEQ ID NO: 153721 - RNA, 27 nt, Artificial Sequence
  Description of Artificial Sequence: Synthetic oligonucleotide
auuugugguuuuguuuucucucucucu

SEQ ID NO: 153722 - RNA, 27 nt, Artificial Sequence
  Description of Artificial Sequence: Synthetic oligonucleotide
uguaugggcuuaaauacuacagcgagg

SEQ ID NO: 153723 - RNA, 27 nt, Artificial Sequence
  Description of Artificial Sequence: Synthetic oligonucleotide
cuguaugggcuuaaauacuacagcgag

SEQ ID NO: 153724 - RNA, 27 nt, Artificial Sequence
  Description of Artificial Sequence: Synthetic oligonucleotide
ggaagguuucuguaugggcuuaaauac

SEQ ID NO: 153725 - RNA, 27 nt, Artificial Sequence
  Description of Artificial Sequence: Synthetic oligonucleotide
guagguauaccauguuuauuuuaauac

SEQ ID NO: 153726 - RNA, 27 nt, Artificial Sequence
  Description of Artificial Sequence: Synthetic oligonucleotide
uccgaaaacuggccgaucagaacagcc

SEQ ID NO: 153727 - RNA, 27 nt, Artificial Sequence
  Description of Artificial Sequence: Synthetic oligonucleotide
cccuguuccaaaguucaaauuauuugu

SEQ ID NO: 153728 - RNA, 27 nt, Artificial Sequence
  Description of Artificial Sequence: Synthetic oligonucleotide
acuggaaaguuaaauuaaggucgcaau

SEQ ID NO: 153729 - RNA, 27 nt, Artificial Sequence
  Description of Artificial Sequence: Synthetic oligonucleotide
caaaaccaaacuuuagcuuucucagcc

SEQ ID NO: 153730 - RNA, 27 nt, Artificial Sequence
  Description of Artificial Sequence: Synthetic oligonucleotide
uacagugggaaguagcaucuuuacuuu

SEQ ID NO: 153731 - RNA, 27 nt, Artificial Sequence
  Description of Artificial Sequence: Synthetic oligonucleotide
ucauaugguaucagcaauuaagcagua

SEQ ID NO: 153732 - RNA, 27 nt, Artificial Sequence
  Description of Artificial Sequence: Synthetic oligonucleotide
cagcccauguuucauucauaugguauc

SEQ ID NO: 153733 - RNA, 27 nt, Artificial Sequence
  Description of Artificial Sequence: Synthetic oligonucleotide
uaugaaaaaguuggauaagaaaguugg

SEQ ID NO: 153734 - RNA, 27 nt, Artificial Sequence
  Description of Artificial Sequence: Synthetic oligonucleotide
uccggccucaugaugucaugcaaggcu

SEQ ID NO: 153735 - RNA, 27 nt, Artificial Sequence
  Description of Artificial Sequence: Synthetic oligonucleotide
acaaaugcagucauauacaaauucagg

SEQ ID NO: 153736 - RNA, 27 nt, Artificial Sequence
  Description of Artificial Sequence: Synthetic oligonucleotide
gguaguaaacauucuacuaggauucuu

SEQ ID NO: 153737 - RNA, 27 nt, Artificial Sequence
  Description of Artificial Sequence: Synthetic oligonucleotide
uuucaucaaaaaauucuucccuuucug

SEQ ID NO: 153738 - RNA, 27 nt, Artificial Sequence
  Description of Artificial Sequence: Synthetic oligonucleotide
aaauucacacacuggcaugccgauagc

SEQ ID NO: 153739 - RNA, 27 nt, Artificial Sequence
  Description of Artificial Sequence: Synthetic oligonucleotide
acauacauugcucuacuaugaggugaa

SEQ ID NO: 153740 - RNA, 27 nt, Artificial Sequence
  Description of Artificial Sequence: Synthetic oligonucleotide
uauauaugugcuuuggcaauucuggug

SEQ ID NO: 153741 - RNA, 27 nt, Artificial Sequence
  Description of Artificial Sequence: Synthetic oligonucleotide
ggagaaacuauuacccagaucaccacu

SEQ ID NO: 153742 - RNA, 27 nt, Artificial Sequence
  Description of Artificial Sequence: Synthetic oligonucleotide
auuuggagaaacuauuacccagaucac

SEQ ID NO: 153743 - RNA, 27 nt, Artificial Sequence
  Description of Artificial Sequence: Synthetic oligonucleotide
uuucuaggaaguauucaucacauccac

SEQ ID NO: 153744 - RNA, 27 nt, Artificial Sequence
  Description of Artificial Sequence: Synthetic oligonucleotide
cauauaugguguagcuguggaaaugcg

SEQ ID NO: 153745 - RNA, 27 nt, Artificial Sequence
  Description of Artificial Sequence: Synthetic oligonucleotide
cuccauucauauaugguguagcugugg

SEQ ID NO: 153746 - RNA, 27 nt, Artificial Sequence
  Description of Artificial Sequence: Synthetic oligonucleotide
aucuucuucucguguaagaacugcagc

SEQ ID NO: 153747 - RNA, 27 nt, Artificial Sequence
  Description of Artificial Sequence: Synthetic oligonucleotide
ucccuguaaaugaucuucuucucgugu

SEQ ID NO: 153748 - RNA, 27 nt, Artificial Sequence
  Description of Artificial Sequence: Synthetic oligonucleotide
gucccuguaaaugaucuucuucucgug

SEQ ID NO: 153749 - RNA, 27 nt, Artificial Sequence
  Description of Artificial Sequence: Synthetic oligonucleotide
ucaggucccuguaaaugaucuucuucu

SEQ ID NO: 153750 - RNA, 27 nt, Artificial Sequence
  Description of Artificial Sequence: Synthetic oligonucleotide
gaugcagucaaacaccucuuccucugu

SEQ ID NO: 153751 - RNA, 27 nt, Artificial Sequence
  Description of Artificial Sequence: Synthetic oligonucleotide
cgaugcagucaaacaccucuuccucug

SEQ ID NO: 153752 - RNA, 27 nt, Artificial Sequence
  Description of Artificial Sequence: Synthetic oligonucleotide
cccugugaacucgcccucaaaguagcg

SEQ ID NO: 153753 - RNA, 27 nt, Artificial Sequence
  Description of Artificial Sequence: Synthetic oligonucleotide
ggacagaggugccaggagaugcccuca

SEQ ID NO: 153754 - RNA, 27 nt, Artificial Sequence
  Description of Artificial Sequence: Synthetic oligonucleotide
uuaaaaagacaaaccauaucacuccuu

SEQ ID NO: 153755 - RNA, 27 nt, Artificial Sequence
  Description of Artificial Sequence: Synthetic oligonucleotide
cuuaaaaagacaaaccauaucacuccu

SEQ ID NO: 153756 - RNA, 27 nt, Artificial Sequence
  Description of Artificial Sequence: Synthetic oligonucleotide
gacaaccuuuaggaucuuuacugcaac

SEQ ID NO: 153757 - RNA, 27 nt, Artificial Sequence
  Description of Artificial Sequence: Synthetic oligonucleotide
gucgacaaccuuuaggaucuuuacugc

SEQ ID NO: 153758 - RNA, 27 nt, Artificial Sequence
  Description of Artificial Sequence: Synthetic oligonucleotide
acaauugccagguuguccuuugucaug

SEQ ID NO: 153759 - RNA, 27 nt, Artificial Sequence
  Description of Artificial Sequence: Synthetic oligonucleotide
ccucgcaccacugggucacaauugcca

SEQ ID NO: 153760 - RNA, 27 nt, Artificial Sequence
  Description of Artificial Sequence: Synthetic oligonucleotide
auuucaugucucuauggaugauguucu

SEQ ID NO: 153761 - RNA, 27 nt, Artificial Sequence
  Description of Artificial Sequence: Synthetic oligonucleotide
uggagaaauauauuguuggauuucaug

SEQ ID NO: 153762 - RNA, 27 nt, Artificial Sequence
  Description of Artificial Sequence: Synthetic oligonucleotide
agccuucauggagaaauauauuguugg

SEQ ID NO: 153763 - RNA, 27 nt, Artificial Sequence
  Description of Artificial Sequence: Synthetic oligonucleotide
accacuccagcgugacuuuacuguugc

SEQ ID NO: 153764 - RNA, 27 nt, Artificial Sequence
  Description of Artificial Sequence: Synthetic oligonucleotide
ccucucuuccuuuacuuucuucacaca

SEQ ID NO: 153765 - RNA, 27 nt, Artificial Sequence
  Description of Artificial Sequence: Synthetic oligonucleotide
gcccgaugcaaggauggcucggaagcg

SEQ ID NO: 153766 - RNA, 27 nt, Artificial Sequence
  Description of Artificial Sequence: Synthetic oligonucleotide
cacaguaggauauucaaccuccauuuc

SEQ ID NO: 153767 - RNA, 27 nt, Artificial Sequence
  Description of Artificial Sequence: Synthetic oligonucleotide
uuacacaguaggauauucaaccuccau

SEQ ID NO: 153768 - RNA, 27 nt, Artificial Sequence
  Description of Artificial Sequence: Synthetic oligonucleotide
uacacuacaagggaaaacucaaaaucu

SEQ ID NO: 153769 - RNA, 27 nt, Artificial Sequence
  Description of Artificial Sequence: Synthetic oligonucleotide
caaucaacaaagaacaaacaggauaaa

SEQ ID NO: 153770 - RNA, 27 nt, Artificial Sequence
  Description of Artificial Sequence: Synthetic oligonucleotide
uuucaaucaacaaagaacaaacaggau

SEQ ID NO: 153771 - RNA, 27 nt, Artificial Sequence
  Description of Artificial Sequence: Synthetic oligonucleotide
auggaagaaaaagaaggcuguagagaa

SEQ ID NO: 153772 - RNA, 27 nt, Artificial Sequence
  Description of Artificial Sequence: Synthetic oligonucleotide
uagaaggaagauuagcuauggaagaaa

SEQ ID NO: 153773 - RNA, 27 nt, Artificial Sequence
  Description of Artificial Sequence: Synthetic oligonucleotide
augaagcauucaacaggaagauuauuu

SEQ ID NO: 153774 - RNA, 27 nt, Artificial Sequence
  Description of Artificial Sequence: Synthetic oligonucleotide
caugaagcauucaacaggaagauuauu

SEQ ID NO: 153775 - RNA, 27 nt, Artificial Sequence
  Description of Artificial Sequence: Synthetic oligonucleotide
ucaaaguagaauucaagucaugaagca

SEQ ID NO: 153776 - RNA, 27 nt, Artificial Sequence
  Description of Artificial Sequence: Synthetic oligonucleotide
gucuguaguugcuucucucccucuuag

SEQ ID NO: 153777 - RNA, 27 nt, Artificial Sequence
  Description of Artificial Sequence: Synthetic oligonucleotide
guugaccuuggucugguaggagacggc

SEQ ID NO: 153778 - RNA, 27 nt, Artificial Sequence
  Description of Artificial Sequence: Synthetic oligonucleotide
gucgagauagucgggccgauugaucuc

SEQ ID NO: 153779 - RNA, 27 nt, Artificial Sequence
  Description of Artificial Sequence: Synthetic oligonucleotide
guuugggaagguuggauguucguccuc

SEQ ID NO: 153780 - RNA, 27 nt, Artificial Sequence
  Description of Artificial Sequence: Synthetic oligonucleotide
aguucuaagcuuggguuccgacccuaa

SEQ ID NO: 153781 - RNA, 27 nt, Artificial Sequence
  Description of Artificial Sequence: Synthetic oligonucleotide
uuaaaguucuaagcuuggguuccgacc

SEQ ID NO: 153782 - RNA, 27 nt, Artificial Sequence
  Description of Artificial Sequence: Synthetic oligonucleotide
guugcuuaaaguucuaagcuuggguuc

SEQ ID NO: 153783 - RNA, 27 nt, Artificial Sequence
  Description of Artificial Sequence: Synthetic oligonucleotide
gugguggucuuguugcuuaaaguucua

SEQ ID NO: 153784 - RNA, 27 nt, Artificial Sequence
  Description of Artificial Sequence: Synthetic oligonucleotide
acuuuauuucucgccacugaauaguag

SEQ ID NO: 153785 - RNA, 27 nt, Artificial Sequence
  Description of Artificial Sequence: Synthetic oligonucleotide
aacuuuauuucucgccacugaauagua

SEQ ID NO: 153786 - RNA, 27 nt, Artificial Sequence
  Description of Artificial Sequence: Synthetic oligonucleotide
ggaucauuuccuguuaucuguguuugu

SEQ ID NO: 153787 - RNA, 27 nt, Artificial Sequence
  Description of Artificial Sequence: Synthetic oligonucleotide
guuucauuucuucucuuuucuuaaggc

SEQ ID NO: 153788 - RNA, 27 nt, Artificial Sequence
  Description of Artificial Sequence: Synthetic oligonucleotide
ggaggauggaaacacacuccuucaguu

SEQ ID NO: 153789 - RNA, 27 nt, Artificial Sequence
  Description of Artificial Sequence: Synthetic oligonucleotide
ucaaagauuuucagucccgcggugaca

SEQ ID NO: 153790 - RNA, 27 nt, Artificial Sequence
  Description of Artificial Sequence: Synthetic oligonucleotide
ccugaacggcacgcuuauuucugcugu

SEQ ID NO: 153791 - RNA, 27 nt, Artificial Sequence
  Description of Artificial Sequence: Synthetic oligonucleotide
cuucuggacccugaacggcacgcuuau

SEQ ID NO: 153792 - RNA, 27 nt, Artificial Sequence
  Description of Artificial Sequence: Synthetic oligonucleotide
caagcagucuugagugacuguuucuuc

SEQ ID NO: 153793 - RNA, 27 nt, Artificial Sequence
  Description of Artificial Sequence: Synthetic oligonucleotide
ccaaagacauggaccuucuuccucuga

SEQ ID NO: 153794 - RNA, 27 nt, Artificial Sequence
  Description of Artificial Sequence: Synthetic oligonucleotide
guguuucaggcauauuuugaauacauc

SEQ ID NO: 153795 - RNA, 27 nt, Artificial Sequence
  Description of Artificial Sequence: Synthetic oligonucleotide
gagguacagagaaagggaggaaaauag

SEQ ID NO: 153796 - RNA, 27 nt, Artificial Sequence
  Description of Artificial Sequence: Synthetic oligonucleotide
ucuugucuugcucuaucuuucuuuggu

SEQ ID NO: 153797 - RNA, 27 nt, Artificial Sequence
  Description of Artificial Sequence: Synthetic oligonucleotide
uuucuugucuugcucuaucuuucuuug

SEQ ID NO: 153798 - RNA, 27 nt, Artificial Sequence
  Description of Artificial Sequence: Synthetic oligonucleotide
ggaucuuguacaaacaaaugcuuucuc

SEQ ID NO: 153799 - RNA, 27 nt, Artificial Sequence
  Description of Artificial Sequence: Synthetic oligonucleotide
ucugcaaguacguucguuuaacucaag

SEQ ID NO: 153800 - RNA, 27 nt, Artificial Sequence
  Description of Artificial Sequence: Synthetic oligonucleotide
ucuguaucgaucguucuguaucagucu

SEQ ID NO: 153801 - RNA, 27 nt, Artificial Sequence
  Description of Artificial Sequence: Synthetic oligonucleotide
auuuauuuuuauauauauauaauauau

SEQ ID NO: 153802 - RNA, 27 nt, Artificial Sequence
  Description of Artificial Sequence: Synthetic oligonucleotide
auauuuauuuuuauauauauauaauau

SEQ ID NO: 153803 - RNA, 27 nt, Artificial Sequence
  Description of Artificial Sequence: Synthetic oligonucleotide
cacagcagucaaauacauccagugaag

SEQ ID NO: 153804 - RNA, 27 nt, Artificial Sequence
  Description of Artificial Sequence: Synthetic oligonucleotide
gucucucaucuccuccucuucccuguc

SEQ ID NO: 153805 - RNA, 27 nt, Artificial Sequence
  Description of Artificial Sequence: Synthetic oligonucleotide
ccaagugggacaaaaaaaagaucaugc

SEQ ID NO: 153806 - RNA, 14 nt, Artificial Sequence
  Description of Artificial Sequence: Synthetic oligonucleotide
guauuuugaugagg

SEQ ID NO: 153807 - RNA, 12 nt, Artificial Sequence
  Description of Artificial Sequence: Synthetic oligonucleotide
ggcccagaugau

SEQ ID NO: 153808 - RNA, 14 nt, Artificial Sequence
  Description of Artificial Sequence: Synthetic oligonucleotide
gggaagaaaacuau

SEQ ID NO: 153809 - RNA, 15 nt, Artificial Sequence
  Description of Artificial Sequence: Synthetic oligonucleotide
guuuuaauuuauuuc

SEQ ID NO: 153810 - RNA, 12 nt, Artificial Sequence
  Description of Artificial Sequence: Synthetic oligonucleotide
acguagggaaau

SEQ ID NO: 153811 - RNA, 12 nt, Artificial Sequence
  Description of Artificial Sequence: Synthetic oligonucleotide
ccaggguuuacc

SEQ ID NO: 153812 - RNA, 11 nt, Artificial Sequence
  Description of Artificial Sequence: Synthetic oligonucleotide
agcaagguuua

SEQ ID NO: 153813 - RNA, 12 nt, Artificial Sequence
  Description of Artificial Sequence: Synthetic oligonucleotide
uguauuauguug

SEQ ID NO: 153814 - RNA, 15 nt, Artificial Sequence
  Description of Artificial Sequence: Synthetic oligonucleotide
uuuuaaucuuuguga

SEQ ID NO: 153815 - RNA, 14 nt, Artificial Sequence
  Description of Artificial Sequence: Synthetic oligonucleotide
uuaaucuuugugac

SEQ ID NO: 153816 - RNA, 13 nt, Artificial Sequence
  Description of Artificial Sequence: Synthetic oligonucleotide
gcugcuuaugucu

SEQ ID NO: 153817 - RNA, 14 nt, Artificial Sequence
  Description of Artificial Sequence: Synthetic oligonucleotide
aaguguuucagaag

SEQ ID NO: 153818 - RNA, 13 nt, Artificial Sequence
  Description of Artificial Sequence: Synthetic oligonucleotide
gaccaucaauaag

SEQ ID NO: 153819 - RNA, 13 nt, Artificial Sequence
  Description of Artificial Sequence: Synthetic oligonucleotide
ccaucaauaagga

SEQ ID NO: 153820 - RNA, 14 nt, Artificial Sequence
  Description of Artificial Sequence: Synthetic oligonucleotide
ucaauaaggaagaa

SEQ ID NO: 153821 - RNA, 14 nt, Artificial Sequence
  Description of Artificial Sequence: Synthetic oligonucleotide
aauaaggaagaagc

SEQ ID NO: 153822 - RNA, 13 nt, Artificial Sequence
  Description of Artificial Sequence: Synthetic oligonucleotide
aggaagaagcccu

SEQ ID NO: 153823 - RNA, 13 nt, Artificial Sequence
  Description of Artificial Sequence: Synthetic oligonucleotide
gcauaacuaaagg

SEQ ID NO: 153824 - RNA, 14 nt, Artificial Sequence
  Description of Artificial Sequence: Synthetic oligonucleotide
cauaacuaaaggug

SEQ ID NO: 153825 - RNA, 12 nt, Artificial Sequence
  Description of Artificial Sequence: Synthetic oligonucleotide
cuacaucacgcc

SEQ ID NO: 153826 - RNA, 12 nt, Artificial Sequence
  Description of Artificial Sequence: Synthetic oligonucleotide
acuggauuuaag

SEQ ID NO: 153827 - RNA, 12 nt, Artificial Sequence
  Description of Artificial Sequence: Synthetic oligonucleotide
cuggauuuaagc

SEQ ID NO: 153828 - RNA, 13 nt, Artificial Sequence
  Description of Artificial Sequence: Synthetic oligonucleotide
gauuuaagcagag

SEQ ID NO: 153829 - RNA, 13 nt, Artificial Sequence
  Description of Artificial Sequence: Synthetic oligonucleotide
auuuaagcagagu

SEQ ID NO: 153830 - RNA, 13 nt, Artificial Sequence
  Description of Artificial Sequence: Synthetic oligonucleotide
uuaagcagaguuc

SEQ ID NO: 153831 - RNA, 13 nt, Artificial Sequence
  Description of Artificial Sequence: Synthetic oligonucleotide
uaagcagaguuca

SEQ ID NO: 153832 - RNA, 14 nt, Artificial Sequence
  Description of Artificial Sequence: Synthetic oligonucleotide
agcagaguucaaaa

SEQ ID NO: 153833 - RNA, 12 nt, Artificial Sequence
  Description of Artificial Sequence: Synthetic oligonucleotide
cucagggucuga

SEQ ID NO: 153834 - RNA, 13 nt, Artificial Sequence
  Description of Artificial Sequence: Synthetic oligonucleotide
caagcaacuacau

SEQ ID NO: 153835 - RNA, 12 nt, Artificial Sequence
  Description of Artificial Sequence: Synthetic oligonucleotide
aucaauggcagc

SEQ ID NO: 153836 - RNA, 11 nt, Artificial Sequence
  Description of Artificial Sequence: Synthetic oligonucleotide
uuccagcccac

SEQ ID NO: 153837 - RNA, 12 nt, Artificial Sequence
  Description of Artificial Sequence: Synthetic oligonucleotide
cagcugagaaug

SEQ ID NO: 153838 - RNA, 13 nt, Artificial Sequence
  Description of Artificial Sequence: Synthetic oligonucleotide
aacguaucuccua

SEQ ID NO: 153839 - RNA, 14 nt, Artificial Sequence
  Description of Artificial Sequence: Synthetic oligonucleotide
ccuaaaauaauuuc

SEQ ID NO: 153840 - RNA, 13 nt, Artificial Sequence
  Description of Artificial Sequence: Synthetic oligonucleotide
uggaagauucagc

SEQ ID NO: 153841 - RNA, 12 nt, Artificial Sequence
  Description of Artificial Sequence: Synthetic oligonucleotide
uuaaacucuccu

SEQ ID NO: 153842 - RNA, 12 nt, Artificial Sequence
  Description of Artificial Sequence: Synthetic oligonucleotide
cagccuacaguu

SEQ ID NO: 153843 - RNA, 13 nt, Artificial Sequence
  Description of Artificial Sequence: Synthetic oligonucleotide
guuauguucaguc

SEQ ID NO: 153844 - RNA, 13 nt, Artificial Sequence
  Description of Artificial Sequence: Synthetic oligonucleotide
cacauacaaaaug

SEQ ID NO: 153845 - RNA, 9 nt, Artificial Sequence
  Description of Artificial Sequence: Synthetic oligonucleotide
uccuuuugc

SEQ ID NO: 153846 - RNA, 12 nt, Artificial Sequence
  Description of Artificial Sequence: Synthetic oligonucleotide
ugaccugugaag

SEQ ID NO: 153847 - RNA, 12 nt, Artificial Sequence
  Description of Artificial Sequence: Synthetic oligonucleotide
cuaucucacaca

SEQ ID NO: 153848 - RNA, 13 nt, Artificial Sequence
  Description of Artificial Sequence: Synthetic oligonucleotide
uguccucaauugu

SEQ ID NO: 153849 - RNA, 12 nt, Artificial Sequence
  Description of Artificial Sequence: Synthetic oligonucleotide
aaaccguagcug

SEQ ID NO: 153850 - RNA, 12 nt, Artificial Sequence
  Description of Artificial Sequence: Synthetic oligonucleotide
uagcuggcaagc

SEQ ID NO: 153851 - RNA, 14 nt, Artificial Sequence
  Description of Artificial Sequence: Synthetic oligonucleotide
uuguaugguuaaaa

SEQ ID NO: 153852 - RNA, 14 nt, Artificial Sequence
  Description of Artificial Sequence: Synthetic oligonucleotide
ugguuaaaagaugg

SEQ ID NO: 153853 - RNA, 13 nt, Artificial Sequence
  Description of Artificial Sequence: Synthetic oligonucleotide
cagggaauuauac

SEQ ID NO: 153854 - RNA, 12 nt, Artificial Sequence
  Description of Artificial Sequence: Synthetic oligonucleotide
acaaucuugcug

SEQ ID NO: 153855 - RNA, 13 nt, Artificial Sequence
  Description of Artificial Sequence: Synthetic oligonucleotide
ccaauaaugaaga

SEQ ID NO: 153856 - RNA, 13 nt, Artificial Sequence
  Description of Artificial Sequence: Synthetic oligonucleotide
acuuuggauguuc

SEQ ID NO: 153857 - RNA, 12 nt, Artificial Sequence
  Description of Artificial Sequence: Synthetic oligonucleotide
aaugcuuccacu

SEQ ID NO: 153858 - RNA, 11 nt, Artificial Sequence
  Description of Artificial Sequence: Synthetic oligonucleotide
gagaaaguuug

SEQ ID NO: 153859 - RNA, 11 nt, Artificial Sequence
  Description of Artificial Sequence: Synthetic oligonucleotide
aaagaacuacu

SEQ ID NO: 153860 - RNA, 12 nt, Artificial Sequence
  Description of Artificial Sequence: Synthetic oligonucleotide
uuagaaauacgg

SEQ ID NO: 153861 - RNA, 12 nt, Artificial Sequence
  Description of Artificial Sequence: Synthetic oligonucleotide
aacauggguaca

SEQ ID NO: 153862 - RNA, 14 nt, Artificial Sequence
  Description of Artificial Sequence: Synthetic oligonucleotide
aaagacacagaaga

SEQ ID NO: 153863 - RNA, 11 nt, Artificial Sequence
  Description of Artificial Sequence: Synthetic oligonucleotide
uaguagggagg

SEQ ID NO: 153864 - RNA, 12 nt, Artificial Sequence
  Description of Artificial Sequence: Synthetic oligonucleotide
gccuucugcagc

SEQ ID NO: 153865 - RNA, 10 nt, Artificial Sequence
  Description of Artificial Sequence: Synthetic oligonucleotide
ggucugguac

SEQ ID NO: 153866 - RNA, 12 nt, Artificial Sequence
  Description of Artificial Sequence: Synthetic oligonucleotide
cuaguccuuccg

SEQ ID NO: 153867 - RNA, 12 nt, Artificial Sequence
  Description of Artificial Sequence: Synthetic oligonucleotide
ccagugaauauu

SEQ ID NO: 153868 - RNA, 13 nt, Artificial Sequence
  Description of Artificial Sequence: Synthetic oligonucleotide
augaauucaaguu

SEQ ID NO: 153869 - RNA, 12 nt, Artificial Sequence
  Description of Artificial Sequence: Synthetic oligonucleotide
caggacacagau

SEQ ID NO: 153870 - RNA, 12 nt, Artificial Sequence
  Description of Artificial Sequence: Synthetic oligonucleotide
cucaaagcacag

SEQ ID NO: 153871 - RNA, 10 nt, Artificial Sequence
  Description of Artificial Sequence: Synthetic oligonucleotide
accacugcca

SEQ ID NO: 153872 - RNA, 13 nt, Artificial Sequence
  Description of Artificial Sequence: Synthetic oligonucleotide
gaaacuacuagug

SEQ ID NO: 153873 - RNA, 12 nt, Artificial Sequence
  Description of Artificial Sequence: Synthetic oligonucleotide
aagucggacagc

SEQ ID NO: 153874 - RNA, 13 nt, Artificial Sequence
  Description of Artificial Sequence: Synthetic oligonucleotide
gaaagcgaaaaau

SEQ ID NO: 153875 - RNA, 13 nt, Artificial Sequence
  Description of Artificial Sequence: Synthetic oligonucleotide
cccucugauuuag

SEQ ID NO: 153876 - RNA, 12 nt, Artificial Sequence
  Description of Artificial Sequence: Synthetic oligonucleotide
ugagcuauuuaa

SEQ ID NO: 153877 - RNA, 13 nt, Artificial Sequence
  Description of Artificial Sequence: Synthetic oligonucleotide
aaaaggugaaaaa

SEQ ID NO: 153878 - RNA, 14 nt, Artificial Sequence
  Description of Artificial Sequence: Synthetic oligonucleotide
gaaaaagcacuauu

SEQ ID NO: 153879 - RNA, 12 nt, Artificial Sequence
  Description of Artificial Sequence: Synthetic oligonucleotide
ggcugaaaagaa

SEQ ID NO: 153880 - RNA, 12 nt, Artificial Sequence
  Description of Artificial Sequence: Synthetic oligonucleotide
uaaacccuuaua

SEQ ID NO: 153881 - RNA, 13 nt, Artificial Sequence
  Description of Artificial Sequence: Synthetic oligonucleotide
cauacuauuagcc

SEQ ID NO: 153882 - RNA, 12 nt, Artificial Sequence
  Description of Artificial Sequence: Synthetic oligonucleotide
gacagaagcauu

SEQ ID NO: 153883 - RNA, 14 nt, Artificial Sequence
  Description of Artificial Sequence: Synthetic oligonucleotide
agagcaaauaagau

SEQ ID NO: 153884 - RNA, 14 nt, Artificial Sequence
  Description of Artificial Sequence: Synthetic oligonucleotide
ccaacauuuuucuc

SEQ ID NO: 153885 - RNA, 15 nt, Artificial Sequence
  Description of Artificial Sequence: Synthetic oligonucleotide
uuaaguaugagaaaa

SEQ ID NO: 153886 - RNA, 14 nt, Artificial Sequence
  Description of Artificial Sequence: Synthetic oligonucleotide
caggaauaaagaug

SEQ ID NO: 153887 - RNA, 13 nt, Artificial Sequence
  Description of Artificial Sequence: Synthetic oligonucleotide
aauuugaaugacc

SEQ ID NO: 153888 - RNA, 14 nt, Artificial Sequence
  Description of Artificial Sequence: Synthetic oligonucleotide
auguauaaagauag

SEQ ID NO: 153889 - RNA, 12 nt, Artificial Sequence
  Description of Artificial Sequence: Synthetic oligonucleotide
ggcuguaacuau

SEQ ID NO: 153890 - RNA, 11 nt, Artificial Sequence
  Description of Artificial Sequence: Synthetic oligonucleotide
ucugugaagug

SEQ ID NO: 153891 - RNA, 14 nt, Artificial Sequence
  Description of Artificial Sequence: Synthetic oligonucleotide
ccuuuaaggaaaug

SEQ ID NO: 153892 - RNA, 13 nt, Artificial Sequence
  Description of Artificial Sequence: Synthetic oligonucleotide
aaggauacaaaaa

SEQ ID NO: 153893 - RNA, 12 nt, Artificial Sequence
  Description of Artificial Sequence: Synthetic oligonucleotide
agaugcaauuug

SEQ ID NO: 153894 - RNA, 12 nt, Artificial Sequence
  Description of Artificial Sequence: Synthetic oligonucleotide
guucaaaacgaa

SEQ ID NO: 153895 - RNA, 11 nt, Artificial Sequence
  Description of Artificial Sequence: Synthetic oligonucleotide
gugaaaccuca

SEQ ID NO: 153896 - RNA, 13 nt, Artificial Sequence
  Description of Artificial Sequence: Synthetic oligonucleotide
acgaaagagaagc

SEQ ID NO: 153897 - RNA, 12 nt, Artificial Sequence
  Description of Artificial Sequence: Synthetic oligonucleotide
cuccacaagcgc

SEQ ID NO: 153898 - RNA, 14 nt, Artificial Sequence
  Description of Artificial Sequence: Synthetic oligonucleotide
gagaagauuccaaa

SEQ ID NO: 153899 - RNA, 13 nt, Artificial Sequence
  Description of Artificial Sequence: Synthetic oligonucleotide
aaucuggauucaa

SEQ ID NO: 153900 - RNA, 13 nt, Artificial Sequence
  Description of Artificial Sequence: Synthetic oligonucleotide
agaacagauuuga

SEQ ID NO: 153901 - RNA, 11 nt, Artificial Sequence
  Description of Artificial Sequence: Synthetic oligonucleotide
ccagagcugug

SEQ ID NO: 153902 - RNA, 12 nt, Artificial Sequence
  Description of Artificial Sequence: Synthetic oligonucleotide
ccucagauuguu

SEQ ID NO: 153903 - RNA, 12 nt, Artificial Sequence
  Description of Artificial Sequence: Synthetic oligonucleotide
cuauuuuaauua

SEQ ID NO: 153904 - RNA, 13 nt, Artificial Sequence
  Description of Artificial Sequence: Synthetic oligonucleotide
uuuaauuuauuaa

SEQ ID NO: 153905 - RNA, 12 nt, Artificial Sequence
  Description of Artificial Sequence: Synthetic oligonucleotide
augcaguuugaa

SEQ ID NO: 153906 - RNA, 11 nt, Artificial Sequence
  Description of Artificial Sequence: Synthetic oligonucleotide
caugcugcugg

SEQ ID NO: 153907 - RNA, 13 nt, Artificial Sequence
  Description of Artificial Sequence: Synthetic oligonucleotide
agaugugcauuuc

SEQ ID NO: 153908 - RNA, 12 nt, Artificial Sequence
  Description of Artificial Sequence: Synthetic oligonucleotide
ucaaaaccugug

SEQ ID NO: 153909 - RNA, 11 nt, Artificial Sequence
  Description of Artificial Sequence: Synthetic oligonucleotide
gaaugugggua

SEQ ID NO: 153910 - RNA, 10 nt, Artificial Sequence
  Description of Artificial Sequence: Synthetic oligonucleotide
auguggguag

SEQ ID NO: 153911 - RNA, 13 nt, Artificial Sequence
  Description of Artificial Sequence: Synthetic oligonucleotide
ugaaaaugagcau

SEQ ID NO: 153912 - RNA, 13 nt, Artificial Sequence
  Description of Artificial Sequence: Synthetic oligonucleotide
uugcuuuucaugu

SEQ ID NO: 153913 - RNA, 12 nt, Artificial Sequence
  Description of Artificial Sequence: Synthetic oligonucleotide
uguauuucuaua

SEQ ID NO: 153914 - RNA, 13 nt, Artificial Sequence
  Description of Artificial Sequence: Synthetic oligonucleotide
uuugauuaauguu

SEQ ID NO: 153915 - RNA, 12 nt, Artificial Sequence
  Description of Artificial Sequence: Synthetic oligonucleotide
caacguguauag

SEQ ID NO: 153916 - RNA, 12 nt, Artificial Sequence
  Description of Artificial Sequence: Synthetic oligonucleotide
cauauccuuggc

SEQ ID NO: 153917 - RNA, 13 nt, Artificial Sequence
  Description of Artificial Sequence: Synthetic oligonucleotide
uacuaacaucugg

SEQ ID NO: 153918 - RNA, 11 nt, Artificial Sequence
  Description of Artificial Sequence: Synthetic oligonucleotide
cauaaguugug

SEQ ID NO: 153919 - RNA, 12 nt, Artificial Sequence
  Description of Artificial Sequence: Synthetic oligonucleotide
gcaucauuuugg

SEQ ID NO: 153920 - RNA, 10 nt, Artificial Sequence
  Description of Artificial Sequence: Synthetic oligonucleotide
gcucuucuua

SEQ ID NO: 153921 - RNA, 10 nt, Artificial Sequence
  Description of Artificial Sequence: Synthetic oligonucleotide
agauuagguc

SEQ ID NO: 153922 - RNA, 12 nt, Artificial Sequence
  Description of Artificial Sequence: Synthetic oligonucleotide
auggaauugaaa

SEQ ID NO: 153923 - RNA, 13 nt, Artificial Sequence
  Description of Artificial Sequence: Synthetic oligonucleotide
cacacucauuccu

SEQ ID NO: 153924 - RNA, 12 nt, Artificial Sequence
  Description of Artificial Sequence: Synthetic oligonucleotide
uguagagguaac

SEQ ID NO: 153925 - RNA, 11 nt, Artificial Sequence
  Description of Artificial Sequence: Synthetic oligonucleotide
caaccacaugc

SEQ ID NO: 153926 - RNA, 12 nt, Artificial Sequence
  Description of Artificial Sequence: Synthetic oligonucleotide
ucggaaacaagu

SEQ ID NO: 153927 - RNA, 11 nt, Artificial Sequence
  Description of Artificial Sequence: Synthetic oligonucleotide
acucccaauaa

SEQ ID NO: 153928 - RNA, 13 nt, Artificial Sequence
  Description of Artificial Sequence: Synthetic oligonucleotide
aaugcuaagaaau

SEQ ID NO: 153929 - RNA, 11 nt, Artificial Sequence
  Description of Artificial Sequence: Synthetic oligonucleotide
gucuuucucua

SEQ ID NO: 153930 - RNA, 11 nt, Artificial Sequence
  Description of Artificial Sequence: Synthetic oligonucleotide
ugaauuucagg

SEQ ID NO: 153931 - RNA, 13 nt, Artificial Sequence
  Description of Artificial Sequence: Synthetic oligonucleotide
cgauucccucuca

SEQ ID NO: 153932 - RNA, 11 nt, Artificial Sequence
  Description of Artificial Sequence: Synthetic oligonucleotide
aggaaagugaa

SEQ ID NO: 153933 - RNA, 12 nt, Artificial Sequence
  Description of Artificial Sequence: Synthetic oligonucleotide
gaggcugcaugc

SEQ ID NO: 153934 - RNA, 11 nt, Artificial Sequence
  Description of Artificial Sequence: Synthetic oligonucleotide
ucucugaacag

SEQ ID NO: 153935 - RNA, 12 nt, Artificial Sequence
  Description of Artificial Sequence: Synthetic oligonucleotide
aacuuggcugua

SEQ ID NO: 153936 - RNA, 12 nt, Artificial Sequence
  Description of Artificial Sequence: Synthetic oligonucleotide
agaagccaaaau

SEQ ID NO: 153937 - RNA, 14 nt, Artificial Sequence
  Description of Artificial Sequence: Synthetic oligonucleotide
auuaaaagaagucc

SEQ ID NO: 153938 - RNA, 14 nt, Artificial Sequence
  Description of Artificial Sequence: Synthetic oligonucleotide
gaauccggauuauc

SEQ ID NO: 153939 - RNA, 12 nt, Artificial Sequence
  Description of Artificial Sequence: Synthetic oligonucleotide
aaugugacauca

SEQ ID NO: 153940 - RNA, 13 nt, Artificial Sequence
  Description of Artificial Sequence: Synthetic oligonucleotide
caucaaagcaagu

SEQ ID NO: 153941 - RNA, 11 nt, Artificial Sequence
  Description of Artificial Sequence: Synthetic oligonucleotide
agagagagaaa

SEQ ID NO: 153942 - RNA, 13 nt, Artificial Sequence
  Description of Artificial Sequence: Synthetic oligonucleotide
ucgcuguaguauu

SEQ ID NO: 153943 - RNA, 14 nt, Artificial Sequence
  Description of Artificial Sequence: Synthetic oligonucleotide
cgcuguaguauuua

SEQ ID NO: 153944 - RNA, 13 nt, Artificial Sequence
  Description of Artificial Sequence: Synthetic oligonucleotide
auuuaagcccaua

SEQ ID NO: 153945 - RNA, 15 nt, Artificial Sequence
  Description of Artificial Sequence: Synthetic oligonucleotide
auuaaaauaaacaug

SEQ ID NO: 153946 - RNA, 12 nt, Artificial Sequence
  Description of Artificial Sequence: Synthetic oligonucleotide
cuguucugaucg

SEQ ID NO: 153947 - RNA, 16 nt, Artificial Sequence
  Description of Artificial Sequence: Synthetic oligonucleotide
aaauaauuugaacuuu

SEQ ID NO: 153948 - RNA, 12 nt, Artificial Sequence
  Description of Artificial Sequence: Synthetic oligonucleotide
ugcgaccuuaau

SEQ ID NO: 153949 - RNA, 11 nt, Artificial Sequence
  Description of Artificial Sequence: Synthetic oligonucleotide
cugagaaagcu

SEQ ID NO: 153950 - RNA, 13 nt, Artificial Sequence
  Description of Artificial Sequence: Synthetic oligonucleotide
aguaaagaugcua

SEQ ID NO: 153951 - RNA, 12 nt, Artificial Sequence
  Description of Artificial Sequence: Synthetic oligonucleotide
cugcuuaauugc

SEQ ID NO: 153952 - RNA, 14 nt, Artificial Sequence
  Description of Artificial Sequence: Synthetic oligonucleotide
uaccauaugaauga

SEQ ID NO: 153953 - RNA, 12 nt, Artificial Sequence
  Description of Artificial Sequence: Synthetic oligonucleotide
aacuuucuuauc

SEQ ID NO: 153954 - RNA, 13 nt, Artificial Sequence
  Description of Artificial Sequence: Synthetic oligonucleotide
ccuugcaugacau

SEQ ID NO: 153955 - RNA, 14 nt, Artificial Sequence
  Description of Artificial Sequence: Synthetic oligonucleotide
ugaauuuguauaug

SEQ ID NO: 153956 - RNA, 12 nt, Artificial Sequence
  Description of Artificial Sequence: Synthetic oligonucleotide
gaauccuaguag

SEQ ID NO: 153957 - RNA, 10 nt, Artificial Sequence
  Description of Artificial Sequence: Synthetic oligonucleotide
gaaagggaag

SEQ ID NO: 153958 - RNA, 11 nt, Artificial Sequence
  Description of Artificial Sequence: Synthetic oligonucleotide
uaucggcaugc

SEQ ID NO: 153959 - RNA, 12 nt, Artificial Sequence
  Description of Artificial Sequence: Synthetic oligonucleotide
caccucauagua

SEQ ID NO: 153960 - RNA, 11 nt, Artificial Sequence
  Description of Artificial Sequence: Synthetic oligonucleotide
ccagaauugcc

SEQ ID NO: 153961 - RNA, 11 nt, Artificial Sequence
  Description of Artificial Sequence: Synthetic oligonucleotide
uggugaucugg

SEQ ID NO: 153962 - RNA, 12 nt, Artificial Sequence
  Description of Artificial Sequence: Synthetic oligonucleotide
gaucuggguaau

SEQ ID NO: 153963 - RNA, 12 nt, Artificial Sequence
  Description of Artificial Sequence: Synthetic oligonucleotide
ggaugugaugaa

SEQ ID NO: 153964 - RNA, 12 nt, Artificial Sequence
  Description of Artificial Sequence: Synthetic oligonucleotide
cauuuccacagc

SEQ ID NO: 153965 - RNA, 11 nt, Artificial Sequence
  Description of Artificial Sequence: Synthetic oligonucleotide
acagcuacacc

SEQ ID NO: 153966 - RNA, 12 nt, Artificial Sequence
  Description of Artificial Sequence: Synthetic oligonucleotide
ugcaguucuuac

SEQ ID NO: 153967 - RNA, 12 nt, Artificial Sequence
  Description of Artificial Sequence: Synthetic oligonucleotide
acgagaagaaga

SEQ ID NO: 153968 - RNA, 12 nt, Artificial Sequence
  Description of Artificial Sequence: Synthetic oligonucleotide
cgagaagaagau

SEQ ID NO: 153969 - RNA, 15 nt, Artificial Sequence
  Description of Artificial Sequence: Synthetic oligonucleotide
aagaagaucauuuac

SEQ ID NO: 153970 - RNA, 11 nt, Artificial Sequence
  Description of Artificial Sequence: Synthetic oligonucleotide
agaggaagagg

SEQ ID NO: 153971 - RNA, 12 nt, Artificial Sequence
  Description of Artificial Sequence: Synthetic oligonucleotide
gaggaagaggug

SEQ ID NO: 153972 - RNA, 13 nt, Artificial Sequence
  Description of Artificial Sequence: Synthetic oligonucleotide
cuacuuugagggc

SEQ ID NO: 153973 - RNA, 12 nt, Artificial Sequence
  Description of Artificial Sequence: Synthetic oligonucleotide
agggcaucuccu

SEQ ID NO: 153974 - RNA, 10 nt, Artificial Sequence
  Description of Artificial Sequence: Synthetic oligonucleotide
ggagugauau

SEQ ID NO: 153975 - RNA, 11 nt, Artificial Sequence
  Description of Artificial Sequence: Synthetic oligonucleotide
gagugauaugg

SEQ ID NO: 153976 - RNA, 12 nt, Artificial Sequence
  Description of Artificial Sequence: Synthetic oligonucleotide
ugcaguaaagau

SEQ ID NO: 153977 - RNA, 13 nt, Artificial Sequence
  Description of Artificial Sequence: Synthetic oligonucleotide
aguaaagauccua

SEQ ID NO: 153978 - RNA, 12 nt, Artificial Sequence
  Description of Artificial Sequence: Synthetic oligonucleotide
ugacaaaggaca

SEQ ID NO: 153979 - RNA, 13 nt, Artificial Sequence
  Description of Artificial Sequence: Synthetic oligonucleotide
gcaauugugaccc

SEQ ID NO: 153980 - RNA, 12 nt, Artificial Sequence
  Description of Artificial Sequence: Synthetic oligonucleotide
aacaucauccau

SEQ ID NO: 153981 - RNA, 12 nt, Artificial Sequence
  Description of Artificial Sequence: Synthetic oligonucleotide
ugaaauccaaca

SEQ ID NO: 153982 - RNA, 15 nt, Artificial Sequence
  Description of Artificial Sequence: Synthetic oligonucleotide
aacaauauauuucuc

SEQ ID NO: 153983 - RNA, 14 nt, Artificial Sequence
  Description of Artificial Sequence: Synthetic oligonucleotide
aacaguaaagucac

SEQ ID NO: 153984 - RNA, 14 nt, Artificial Sequence
  Description of Artificial Sequence: Synthetic oligonucleotide
ugugaagaaaguaa

SEQ ID NO: 153985 - RNA, 13 nt, Artificial Sequence
  Description of Artificial Sequence: Synthetic oligonucleotide
cuuccgagccauc

SEQ ID NO: 153986 - RNA, 12 nt, Artificial Sequence
  Description of Artificial Sequence: Synthetic oligonucleotide
aauggagguuga

SEQ ID NO: 153987 - RNA, 12 nt, Artificial Sequence
  Description of Artificial Sequence: Synthetic oligonucleotide
ggagguugaaua

SEQ ID NO: 153988 - RNA, 13 nt, Artificial Sequence
  Description of Artificial Sequence: Synthetic oligonucleotide
auuuugaguuuuc

SEQ ID NO: 153989 - RNA, 12 nt, Artificial Sequence
  Description of Artificial Sequence: Synthetic oligonucleotide
uauccuguuugu

SEQ ID NO: 153990 - RNA, 11 nt, Artificial Sequence
  Description of Artificial Sequence: Synthetic oligonucleotide
ccuguuuguuc

SEQ ID NO: 153991 - RNA, 10 nt, Artificial Sequence
  Description of Artificial Sequence: Synthetic oligonucleotide
cucuacagcc

SEQ ID NO: 153992 - RNA, 12 nt, Artificial Sequence
  Description of Artificial Sequence: Synthetic oligonucleotide
ucuuccauagcu

SEQ ID NO: 153993 - RNA, 12 nt, Artificial Sequence
  Description of Artificial Sequence: Synthetic oligonucleotide
auaaucuuccug

SEQ ID NO: 153994 - RNA, 12 nt, Artificial Sequence
  Description of Artificial Sequence: Synthetic oligonucleotide
uaaucuuccugu

SEQ ID NO: 153995 - RNA, 12 nt, Artificial Sequence
  Description of Artificial Sequence: Synthetic oligonucleotide
cuucaugacuug

SEQ ID NO: 153996 - RNA, 12 nt, Artificial Sequence
  Description of Artificial Sequence: Synthetic oligonucleotide
aagagggagaga

SEQ ID NO: 153997 - RNA, 12 nt, Artificial Sequence
  Description of Artificial Sequence: Synthetic oligonucleotide
cgucuccuacca

SEQ ID NO: 153998 - RNA, 12 nt, Artificial Sequence
  Description of Artificial Sequence: Synthetic oligonucleotide
gaucaaucggcc

SEQ ID NO: 153999 - RNA, 12 nt, Artificial Sequence
  Description of Artificial Sequence: Synthetic oligonucleotide
ggacgaacaucc

SEQ ID NO: 154000 - RNA, 11 nt, Artificial Sequence
  Description of Artificial Sequence: Synthetic oligonucleotide
agggucggaac

SEQ ID NO: 154001 - RNA, 10 nt, Artificial Sequence
  Description of Artificial Sequence: Synthetic oligonucleotide
ucggaaccca

SEQ ID NO: 154002 - RNA, 11 nt, Artificial Sequence
  Description of Artificial Sequence: Synthetic oligonucleotide
acccaagcuua

SEQ ID NO: 154003 - RNA, 14 nt, Artificial Sequence
  Description of Artificial Sequence: Synthetic oligonucleotide
gaacuuuaagcaac

SEQ ID NO: 154004 - RNA, 11 nt, Artificial Sequence
  Description of Artificial Sequence: Synthetic oligonucleotide
acuauucagug

SEQ ID NO: 154005 - RNA, 11 nt, Artificial Sequence
  Description of Artificial Sequence: Synthetic oligonucleotide
cuauucagugg

SEQ ID NO: 154006 - RNA, 13 nt, Artificial Sequence
  Description of Artificial Sequence: Synthetic oligonucleotide
aaacacagauaac

SEQ ID NO: 154007 - RNA, 12 nt, Artificial Sequence
  Description of Artificial Sequence: Synthetic oligonucleotide
cuuaagaaaaga

SEQ ID NO: 154008 - RNA, 12 nt, Artificial Sequence
  Description of Artificial Sequence: Synthetic oligonucleotide
cugaaggagugu

SEQ ID NO: 154009 - RNA, 10 nt, Artificial Sequence
  Description of Artificial Sequence: Synthetic oligonucleotide
ucaccgcggg

SEQ ID NO: 154010 - RNA, 14 nt, Artificial Sequence
  Description of Artificial Sequence: Synthetic oligonucleotide
agcagaaauaagcg

SEQ ID NO: 154011 - RNA, 12 nt, Artificial Sequence
  Description of Artificial Sequence: Synthetic oligonucleotide
aagcgugccguu

SEQ ID NO: 154012 - RNA, 12 nt, Artificial Sequence
  Description of Artificial Sequence: Synthetic oligonucleotide
agaaacagucac

SEQ ID NO: 154013 - RNA, 12 nt, Artificial Sequence
  Description of Artificial Sequence: Synthetic oligonucleotide
agaggaagaagg

SEQ ID NO: 154014 - RNA, 14 nt, Artificial Sequence
  Description of Artificial Sequence: Synthetic oligonucleotide
uguauucaaaauau

SEQ ID NO: 154015 - RNA, 13 nt, Artificial Sequence
  Description of Artificial Sequence: Synthetic oligonucleotide
auuuuccucccuu

SEQ ID NO: 154016 - RNA, 13 nt, Artificial Sequence
  Description of Artificial Sequence: Synthetic oligonucleotide
caaagaaagauag

SEQ ID NO: 154017 - RNA, 12 nt, Artificial Sequence
  Description of Artificial Sequence: Synthetic oligonucleotide
aagaaagauaga

SEQ ID NO: 154018 - RNA, 13 nt, Artificial Sequence
  Description of Artificial Sequence: Synthetic oligonucleotide
gaaagcauuuguu

SEQ ID NO: 154019 - RNA, 13 nt, Artificial Sequence
  Description of Artificial Sequence: Synthetic oligonucleotide
ugaguuaaacgaa

SEQ ID NO: 154020 - RNA, 12 nt, Artificial Sequence
  Description of Artificial Sequence: Synthetic oligonucleotide
acugauacagaa

SEQ ID NO: 154021 - RNA, 12 nt, Artificial Sequence
  Description of Artificial Sequence: Synthetic oligonucleotide
auauuauauaua

SEQ ID NO: 154022 - RNA, 12 nt, Artificial Sequence
  Description of Artificial Sequence: Synthetic oligonucleotide
auuauauauaua

SEQ ID NO: 154023 - RNA, 12 nt, Artificial Sequence
  Description of Artificial Sequence: Synthetic oligonucleotide
ucacuggaugua

SEQ ID NO: 154024 - RNA, 12 nt, Artificial Sequence
  Description of Artificial Sequence: Synthetic oligonucleotide
cagggaagagga

SEQ ID NO: 154025 - RNA, 15 nt, Artificial Sequence
  Description of Artificial Sequence: Synthetic oligonucleotide
augaucuuuuuuuug

SEQ ID NO: 154026 - RNA, 11 nt, Artificial Sequence
  Description of Artificial Sequence: Synthetic oligonucleotide
aguucacggcc

SEQ ID NO: 154027 - RNA, 13 nt, Artificial Sequence
  Description of Artificial Sequence: Synthetic oligonucleotide
caccaucacacca

SEQ ID NO: 154028 - RNA, 11 nt, Artificial Sequence
  Description of Artificial Sequence: Synthetic oligonucleotide
ccugcggguuu

SEQ ID NO: 154029 - RNA, 10 nt, Artificial Sequence
  Description of Artificial Sequence: Synthetic oligonucleotide
auccaguuug

SEQ ID NO: 154030 - RNA, 13 nt, Artificial Sequence
  Description of Artificial Sequence: Synthetic oligonucleotide
guuaaggacuucu

SEQ ID NO: 154031 - RNA, 13 nt, Artificial Sequence
  Description of Artificial Sequence: Synthetic oligonucleotide
cagugggacagag

SEQ ID NO: 154032 - RNA, 14 nt, Artificial Sequence
  Description of Artificial Sequence: Synthetic oligonucleotide
aauuuguuauugug

SEQ ID NO: 154033 - RNA, 13 nt, Artificial Sequence
  Description of Artificial Sequence: Synthetic oligonucleotide
uucaaaugcauuu

SEQ ID NO: 154034 - RNA, 10 nt, Artificial Sequence
  Description of Artificial Sequence: Synthetic oligonucleotide
caggaaagcc

SEQ ID NO: 154035 - RNA, 11 nt, Artificial Sequence
  Description of Artificial Sequence: Synthetic oligonucleotide
aggaaagcccu

SEQ ID NO: 154036 - RNA, 12 nt, Artificial Sequence
  Description of Artificial Sequence: Synthetic oligonucleotide
cccagcauggcc

SEQ ID NO: 154037 - RNA, 11 nt, Artificial Sequence
  Description of Artificial Sequence: Synthetic oligonucleotide
cuucucccuga

SEQ ID NO: 154038 - RNA, 12 nt, Artificial Sequence
  Description of Artificial Sequence: Synthetic oligonucleotide
gaagaagcccuu

SEQ ID NO: 154039 - RNA, 12 nt, Artificial Sequence
  Description of Artificial Sequence: Synthetic oligonucleotide
agaagcccuuca

SEQ ID NO: 154040 - RNA, 11 nt, Artificial Sequence
  Description of Artificial Sequence: Synthetic oligonucleotide
gcccuucagcg

SEQ ID NO: 154041 - RNA, 11 nt, Artificial Sequence
  Description of Artificial Sequence: Synthetic oligonucleotide
ccuucagcggc

SEQ ID NO: 154042 - RNA, 12 nt, Artificial Sequence
  Description of Artificial Sequence: Synthetic oligonucleotide
ucagcggccagu

SEQ ID NO: 154043 - RNA, 12 nt, Artificial Sequence
  Description of Artificial Sequence: Synthetic oligonucleotide
ugaaaagcuccg

SEQ ID NO: 154044 - RNA, 11 nt, Artificial Sequence
  Description of Artificial Sequence: Synthetic oligonucleotide
aaaagcuccgg

SEQ ID NO: 154045 - RNA, 13 nt, Artificial Sequence
  Description of Artificial Sequence: Synthetic oligonucleotide
agucaacagucug

SEQ ID NO: 154046 - RNA, 13 nt, Artificial Sequence
  Description of Artificial Sequence: Synthetic oligonucleotide
cagaguucaaaag

SEQ ID NO: 154047 - RNA, 13 nt, Artificial Sequence
  Description of Artificial Sequence: Synthetic oligonucleotide
agaguucaaaagc

SEQ ID NO: 154048 - RNA, 12 nt, Artificial Sequence
  Description of Artificial Sequence: Synthetic oligonucleotide
uucaaaagcccu

SEQ ID NO: 154049 - RNA, 12 nt, Artificial Sequence
  Description of Artificial Sequence: Synthetic oligonucleotide
ucaaaagcccuu

SEQ ID NO: 154050 - RNA, 12 nt, Artificial Sequence
  Description of Artificial Sequence: Synthetic oligonucleotide
aaaagcccuuca

SEQ ID NO: 154051 - RNA, 12 nt, Artificial Sequence
  Description of Artificial Sequence: Synthetic oligonucleotide
aaagcccuucag

SEQ ID NO: 154052 - RNA, 13 nt, Artificial Sequence
  Description of Artificial Sequence: Synthetic oligonucleotide
gugaagccgcucg

SEQ ID NO: 154053 - RNA, 12 nt, Artificial Sequence
  Description of Artificial Sequence: Synthetic oligonucleotide
cacgccagucaa

SEQ ID NO: 154054 - RNA, 13 nt, Artificial Sequence
  Description of Artificial Sequence: Synthetic oligonucleotide
uucuuggugcgug

SEQ ID NO: 154055 - RNA, 14 nt, Artificial Sequence
  Description of Artificial Sequence: Synthetic oligonucleotide
auuggauucaucag

SEQ ID NO: 154056 - RNA, 13 nt, Artificial Sequence
  Description of Artificial Sequence: Synthetic oligonucleotide
uggaauaccuaag

SEQ ID NO: 154057 - RNA, 12 nt, Artificial Sequence
  Description of Artificial Sequence: Synthetic oligonucleotide
auuugaggcuca

SEQ ID NO: 154058 - RNA, 11 nt, Artificial Sequence
  Description of Artificial Sequence: Synthetic oligonucleotide
ucuacaauugg

SEQ ID NO: 154059 - RNA, 12 nt, Artificial Sequence
  Description of Artificial Sequence: Synthetic oligonucleotide
uaguuaggagcc

SEQ ID NO: 154060 - RNA, 13 nt, Artificial Sequence
  Description of Artificial Sequence: Synthetic oligonucleotide
agucaauauccac

SEQ ID NO: 154061 - RNA, 13 nt, Artificial Sequence
  Description of Artificial Sequence: Synthetic oligonucleotide
auguucagucaca

SEQ ID NO: 154062 - RNA, 12 nt, Artificial Sequence
  Description of Artificial Sequence: Synthetic oligonucleotide
acacacacauac

SEQ ID NO: 154063 - RNA, 12 nt, Artificial Sequence
  Description of Artificial Sequence: Synthetic oligonucleotide
uuccuuuugcuu

SEQ ID NO: 154064 - RNA, 16 nt, Artificial Sequence
  Description of Artificial Sequence: Synthetic oligonucleotide
uuuuaaaguaauuuuu

SEQ ID NO: 154065 - RNA, 13 nt, Artificial Sequence
  Description of Artificial Sequence: Synthetic oligonucleotide
caacagucaaugg

SEQ ID NO: 154066 - RNA, 13 nt, Artificial Sequence
  Description of Artificial Sequence: Synthetic oligonucleotide
ucgacaaaccaau

SEQ ID NO: 154067 - RNA, 12 nt, Artificial Sequence
  Description of Artificial Sequence: Synthetic oligonucleotide
acugcuaccacu

SEQ ID NO: 154068 - RNA, 13 nt, Artificial Sequence
  Description of Artificial Sequence: Synthetic oligonucleotide
gcaagcggucuua

SEQ ID NO: 154069 - RNA, 13 nt, Artificial Sequence
  Description of Artificial Sequence: Synthetic oligonucleotide
ggucuuaccggcu

SEQ ID NO: 154070 - RNA, 11 nt, Artificial Sequence
  Description of Artificial Sequence: Synthetic oligonucleotide
gauggguuacc

SEQ ID NO: 154071 - RNA, 11 nt, Artificial Sequence
  Description of Artificial Sequence: Synthetic oligonucleotide
guuaccugcga

SEQ ID NO: 154072 - RNA, 12 nt, Artificial Sequence
  Description of Artificial Sequence: Synthetic oligonucleotide
aaucuugcugag

SEQ ID NO: 154073 - RNA, 13 nt, Artificial Sequence
  Description of Artificial Sequence: Synthetic oligonucleotide
agcauaaaacagu

SEQ ID NO: 154074 - RNA, 12 nt, Artificial Sequence
  Description of Artificial Sequence: Synthetic oligonucleotide
guccuuuauccu

SEQ ID NO: 154075 - RNA, 12 nt, Artificial Sequence
  Description of Artificial Sequence: Synthetic oligonucleotide
caacgcaaguug

SEQ ID NO: 154076 - RNA, 13 nt, Artificial Sequence
  Description of Artificial Sequence: Synthetic oligonucleotide
aaacugaaaccau

SEQ ID NO: 154077 - RNA, 14 nt, Artificial Sequence
  Description of Artificial Sequence: Synthetic oligonucleotide
acuuuguuaaauau

SEQ ID NO: 154078 - RNA, 14 nt, Artificial Sequence
  Description of Artificial Sequence: Synthetic oligonucleotide
guauauuaaaaguu

SEQ ID NO: 154079 - RNA, 13 nt, Artificial Sequence
  Description of Artificial Sequence: Synthetic oligonucleotide
guuuugacuuaac

SEQ ID NO: 154080 - RNA, 13 nt, Artificial Sequence
  Description of Artificial Sequence: Synthetic oligonucleotide
gcaaacucagcac

SEQ ID NO: 154081 - RNA, 11 nt, Artificial Sequence
  Description of Artificial Sequence: Synthetic oligonucleotide
ugcugaccuca

SEQ ID NO: 154082 - RNA, 14 nt, Artificial Sequence
  Description of Artificial Sequence: Synthetic oligonucleotide
uuuauucagaucgc

SEQ ID NO: 154083 - RNA, 13 nt, Artificial Sequence
  Description of Artificial Sequence: Synthetic oligonucleotide
aggguucugggau

SEQ ID NO: 154084 - RNA, 15 nt, Artificial Sequence
  Description of Artificial Sequence: Synthetic oligonucleotide
auauuggaaauuaug

SEQ ID NO: 154085 - RNA, 13 nt, Artificial Sequence
  Description of Artificial Sequence: Synthetic oligonucleotide
auggaagcacuag

SEQ ID NO: 154086 - RNA, 13 nt, Artificial Sequence
  Description of Artificial Sequence: Synthetic oligonucleotide
guuuuuaugugga

SEQ ID NO: 154087 - RNA, 12 nt, Artificial Sequence
  Description of Artificial Sequence: Synthetic oligonucleotide
ggaauugguaga

SEQ ID NO: 154088 - RNA, 13 nt, Artificial Sequence
  Description of Artificial Sequence: Synthetic oligonucleotide
uuagacuuggaga

SEQ ID NO: 154089 - RNA, 13 nt, Artificial Sequence
  Description of Artificial Sequence: Synthetic oligonucleotide
uuacaguauucca

SEQ ID NO: 154090 - RNA, 15 nt, Artificial Sequence
  Description of Artificial Sequence: Synthetic oligonucleotide
ccacugaugaauuaa

SEQ ID NO: 154091 - RNA, 12 nt, Artificial Sequence
  Description of Artificial Sequence: Synthetic oligonucleotide
ccacaucaucac

SEQ ID NO: 154092 - RNA, 13 nt, Artificial Sequence
  Description of Artificial Sequence: Synthetic oligonucleotide
cucaccaaacaga

SEQ ID NO: 154093 - RNA, 12 nt, Artificial Sequence
  Description of Artificial Sequence: Synthetic oligonucleotide
ggaacaugaugg

SEQ ID NO: 154094 - RNA, 12 nt, Artificial Sequence
  Description of Artificial Sequence: Synthetic oligonucleotide
cauguagacugc

SEQ ID NO: 154095 - RNA, 13 nt, Artificial Sequence
  Description of Artificial Sequence: Synthetic oligonucleotide
ggaucuauuuaug

SEQ ID NO: 154096 - RNA, 12 nt, Artificial Sequence
  Description of Artificial Sequence: Synthetic oligonucleotide
gcacuauuauca

SEQ ID NO: 154097 - RNA, 11 nt, Artificial Sequence
  Description of Artificial Sequence: Synthetic oligonucleotide
aucaguucugc

SEQ ID NO: 154098 - RNA, 13 nt, Artificial Sequence
  Description of Artificial Sequence: Synthetic oligonucleotide
agauuaaaccuac

SEQ ID NO: 154099 - RNA, 13 nt, Artificial Sequence
  Description of Artificial Sequence: Synthetic oligonucleotide
auaaaauccuucu

SEQ ID NO: 154100 - RNA, 12 nt, Artificial Sequence
  Description of Artificial Sequence: Synthetic oligonucleotide
aaugcuguagac

SEQ ID NO: 154101 - RNA, 13 nt, Artificial Sequence
  Description of Artificial Sequence: Synthetic oligonucleotide
uugauaggaauag

SEQ ID NO: 154102 - RNA, 11 nt, Artificial Sequence
  Description of Artificial Sequence: Synthetic oligonucleotide
aauggcccuga

SEQ ID NO: 154103 - RNA, 11 nt, Artificial Sequence
  Description of Artificial Sequence: Synthetic oligonucleotide
uuccucaagca

SEQ ID NO: 154104 - RNA, 10 nt, Artificial Sequence
  Description of Artificial Sequence: Synthetic oligonucleotide
guucagccca

SEQ ID NO: 154105 - RNA, 11 nt, Artificial Sequence
  Description of Artificial Sequence: Synthetic oligonucleotide
gcugcugaacc

SEQ ID NO: 154106 - RNA, 12 nt, Artificial Sequence
  Description of Artificial Sequence: Synthetic oligonucleotide
aaguucucuuca

SEQ ID NO: 154107 - RNA, 11 nt, Artificial Sequence
  Description of Artificial Sequence: Synthetic oligonucleotide
ccagccuagag

SEQ ID NO: 154108 - RNA, 13 nt, Artificial Sequence
  Description of Artificial Sequence: Synthetic oligonucleotide
cucugugaagugu

SEQ ID NO: 154109 - RNA, 14 nt, Artificial Sequence
  Description of Artificial Sequence: Synthetic oligonucleotide
ugagaaaauuucaa

SEQ ID NO: 154110 - RNA, 11 nt, Artificial Sequence
  Description of Artificial Sequence: Synthetic oligonucleotide
aauccuccuga

SEQ ID NO: 154111 - RNA, 12 nt, Artificial Sequence
  Description of Artificial Sequence: Synthetic oligonucleotide
gugacaucauau

SEQ ID NO: 154112 - RNA, 13 nt, Artificial Sequence
  Description of Artificial Sequence: Synthetic oligonucleotide
aaucuucaucaua

SEQ ID NO: 154113 - RNA, 13 nt, Artificial Sequence
  Description of Artificial Sequence: Synthetic oligonucleotide
gacuagcuauuaa

SEQ ID NO: 154114 - RNA, 14 nt, Artificial Sequence
  Description of Artificial Sequence: Synthetic oligonucleotide
ucucuacuaaaaau

SEQ ID NO: 154115 - RNA, 12 nt, Artificial Sequence
  Description of Artificial Sequence: Synthetic oligonucleotide
ucuaucucgccu

SEQ ID NO: 154116 - RNA, 13 nt, Artificial Sequence
  Description of Artificial Sequence: Synthetic oligonucleotide
cuucgguccaguu

SEQ ID NO: 154117 - RNA, 11 nt, Artificial Sequence
  Description of Artificial Sequence: Synthetic oligonucleotide
gauguagccgc

SEQ ID NO: 154118 - RNA, 12 nt, Artificial Sequence
  Description of Artificial Sequence: Synthetic oligonucleotide
ugaggagacuug

SEQ ID NO: 154119 - RNA, 12 nt, Artificial Sequence
  Description of Artificial Sequence: Synthetic oligonucleotide
gaguagugagga

SEQ ID NO: 154120 - RNA, 14 nt, Artificial Sequence
  Description of Artificial Sequence: Synthetic oligonucleotide
cagaugaguacaaa

SEQ ID NO: 154121 - RNA, 13 nt, Artificial Sequence
  Description of Artificial Sequence: Synthetic oligonucleotide
guuguuaaugggc

SEQ ID NO: 154122 - RNA, 13 nt, Artificial Sequence
  Description of Artificial Sequence: Synthetic oligonucleotide
uuuuuaauuuauu

SEQ ID NO: 154123 - RNA, 12 nt, Artificial Sequence
  Description of Artificial Sequence: Synthetic oligonucleotide
uauuuaaauaug

SEQ ID NO: 154124 - RNA, 13 nt, Artificial Sequence
  Description of Artificial Sequence: Synthetic oligonucleotide
uauccuuuguuuc

SEQ ID NO: 154125 - RNA, 14 nt, Artificial Sequence
  Description of Artificial Sequence: Synthetic oligonucleotide
cgucuaaguguuug

SEQ ID NO: 154126 - RNA, 12 nt, Artificial Sequence
  Description of Artificial Sequence: Synthetic oligonucleotide
accugugacaaa

SEQ ID NO: 154127 - RNA, 13 nt, Artificial Sequence
  Description of Artificial Sequence: Synthetic oligonucleotide
ccaggcugaauua

SEQ ID NO: 154128 - RNA, 14 nt, Artificial Sequence
  Description of Artificial Sequence: Synthetic oligonucleotide
gucauucuuacaau

SEQ ID NO: 154129 - RNA, 15 nt, Artificial Sequence
  Description of Artificial Sequence: Synthetic oligonucleotide
ucauucuuacaauug

SEQ ID NO: 154130 - RNA, 12 nt, Artificial Sequence
  Description of Artificial Sequence: Synthetic oligonucleotide
cagagaguguac

SEQ ID NO: 154131 - RNA, 12 nt, Artificial Sequence
  Description of Artificial Sequence: Synthetic oligonucleotide
agaacucagcag

SEQ ID NO: 154132 - RNA, 13 nt, Artificial Sequence
  Description of Artificial Sequence: Synthetic oligonucleotide
uuuauuuucagua

SEQ ID NO: 154133 - RNA, 12 nt, Artificial Sequence
  Description of Artificial Sequence: Synthetic oligonucleotide
ucuuaaauggaa

SEQ ID NO: 154134 - RNA, 13 nt, Artificial Sequence
  Description of Artificial Sequence: Synthetic oligonucleotide
ugccuaaaauugu

SEQ ID NO: 154135 - RNA, 12 nt, Artificial Sequence
  Description of Artificial Sequence: Synthetic oligonucleotide
agacugugagcu

SEQ ID NO: 154136 - RNA, 14 nt, Artificial Sequence
  Description of Artificial Sequence: Synthetic oligonucleotide
ugcuuuuuauuaau

SEQ ID NO: 154137 - RNA, 13 nt, Artificial Sequence
  Description of Artificial Sequence: Synthetic oligonucleotide
cucuucuuacauu

SEQ ID NO: 154138 - RNA, 15 nt, Artificial Sequence
  Description of Artificial Sequence: Synthetic oligonucleotide
cauuuguaaaaaugu

SEQ ID NO: 154139 - RNA, 15 nt, Artificial Sequence
  Description of Artificial Sequence: Synthetic oligonucleotide
aucuuaauucauauu

SEQ ID NO: 154140 - RNA, 13 nt, Artificial Sequence
  Description of Artificial Sequence: Synthetic oligonucleotide
gaacuaaucauga

SEQ ID NO: 154141 - RNA, 12 nt, Artificial Sequence
  Description of Artificial Sequence: Synthetic oligonucleotide
ucugcucuuggg

SEQ ID NO: 154142 - RNA, 13 nt, Artificial Sequence
  Description of Artificial Sequence: Synthetic oligonucleotide
caguagcuuugag

SEQ ID NO: 154143 - RNA, 14 nt, Artificial Sequence
  Description of Artificial Sequence: Synthetic oligonucleotide
cacguaauauuuca

SEQ ID NO: 154144 - RNA, 13 nt, Artificial Sequence
  Description of Artificial Sequence: Synthetic oligonucleotide
uauucucuucacu

SEQ ID NO: 154145 - RNA, 14 nt, Artificial Sequence
  Description of Artificial Sequence: Synthetic oligonucleotide
cuaaugcuaagaaa

SEQ ID NO: 154146 - RNA, 12 nt, Artificial Sequence
  Description of Artificial Sequence: Synthetic oligonucleotide
gcugaaaaucaa

SEQ ID NO: 154147 - RNA, 14 nt, Artificial Sequence
  Description of Artificial Sequence: Synthetic oligonucleotide
aauaugauuacuuu

SEQ ID NO: 154148 - RNA, 14 nt, Artificial Sequence
  Description of Artificial Sequence: Synthetic oligonucleotide
cauuuuguucuaca

SEQ ID NO: 154149 - RNA, 12 nt, Artificial Sequence
  Description of Artificial Sequence: Synthetic oligonucleotide
cccgggacucuc

SEQ ID NO: 154150 - RNA, 14 nt, Artificial Sequence
  Description of Artificial Sequence: Synthetic oligonucleotide
ccuuuaaaguaaag

SEQ ID NO: 154151 - RNA, 13 nt, Artificial Sequence
  Description of Artificial Sequence: Synthetic oligonucleotide
ucuggaagccugg

SEQ ID NO: 154152 - RNA, 14 nt, Artificial Sequence
  Description of Artificial Sequence: Synthetic oligonucleotide
aaaacaaaagagag

SEQ ID NO: 154153 - RNA, 13 nt, Artificial Sequence
  Description of Artificial Sequence: Synthetic oligonucleotide
aucaguuaugccg

SEQ ID NO: 154154 - RNA, 13 nt, Artificial Sequence
  Description of Artificial Sequence: Synthetic oligonucleotide
uaaaagaagucca

SEQ ID NO: 154155 - RNA, 11 nt, Artificial Sequence
  Description of Artificial Sequence: Synthetic oligonucleotide
aggugagguua

SEQ ID NO: 154156 - RNA, 11 nt, Artificial Sequence
  Description of Artificial Sequence: Synthetic oligonucleotide
gggaagaggac

SEQ ID NO: 154157 - RNA, 13 nt, Artificial Sequence
  Description of Artificial Sequence: Synthetic oligonucleotide
aagcaaguauugu

SEQ ID NO: 154158 - RNA, 12 nt, Artificial Sequence
  Description of Artificial Sequence: Synthetic oligonucleotide
auuguagcacuc

SEQ ID NO: 154159 - RNA, 14 nt, Artificial Sequence
  Description of Artificial Sequence: Synthetic oligonucleotide
acaaaaccacaaau

SEQ ID NO: 154160 - RNA, 12 nt, Artificial Sequence
  Description of Artificial Sequence: Synthetic oligonucleotide
uaagcccauaca

SEQ ID NO: 154161 - RNA, 11 nt, Artificial Sequence
  Description of Artificial Sequence: Synthetic oligonucleotide
agcccauacag

SEQ ID NO: 154162 - RNA, 12 nt, Artificial Sequence
  Description of Artificial Sequence: Synthetic oligonucleotide
cagaaaccuucc

SEQ ID NO: 154163 - RNA, 10 nt, Artificial Sequence
  Description of Artificial Sequence: Synthetic oligonucleotide
guauaccuac

SEQ ID NO: 154164 - RNA, 13 nt, Artificial Sequence
  Description of Artificial Sequence: Synthetic oligonucleotide
gccaguuuucgga

SEQ ID NO: 154165 - RNA, 9 nt, Artificial Sequence
  Description of Artificial Sequence: Synthetic oligonucleotide
ggaacaggg

SEQ ID NO: 154166 - RNA, 13 nt, Artificial Sequence
  Description of Artificial Sequence: Synthetic oligonucleotide
uuaacuuuccagu

SEQ ID NO: 154167 - RNA, 14 nt, Artificial Sequence
  Description of Artificial Sequence: Synthetic oligonucleotide
aaaguuugguuuug

SEQ ID NO: 154168 - RNA, 12 nt, Artificial Sequence
  Description of Artificial Sequence: Synthetic oligonucleotide
cuucccacugua

SEQ ID NO: 154169 - RNA, 13 nt, Artificial Sequence
  Description of Artificial Sequence: Synthetic oligonucleotide
ugauaccauauga

SEQ ID NO: 154170 - RNA, 11 nt, Artificial Sequence
  Description of Artificial Sequence: Synthetic oligonucleotide
aacaugggcug

SEQ ID NO: 154171 - RNA, 13 nt, Artificial Sequence
  Description of Artificial Sequence: Synthetic oligonucleotide
caacuuuuucaua

SEQ ID NO: 154172 - RNA, 12 nt, Artificial Sequence
  Description of Artificial Sequence: Synthetic oligonucleotide
caugaggccgga

SEQ ID NO: 154173 - RNA, 11 nt, Artificial Sequence
  Description of Artificial Sequence: Synthetic oligonucleotide
acugcauuugu

SEQ ID NO: 154174 - RNA, 13 nt, Artificial Sequence
  Description of Artificial Sequence: Synthetic oligonucleotide
aauguuuacuacc

SEQ ID NO: 154175 - RNA, 15 nt, Artificial Sequence
  Description of Artificial Sequence: Synthetic oligonucleotide
aauuuuuugaugaaa

SEQ ID NO: 154176 - RNA, 14 nt, Artificial Sequence
  Description of Artificial Sequence: Synthetic oligonucleotide
cagugugugaauuu

SEQ ID NO: 154177 - RNA, 13 nt, Artificial Sequence
  Description of Artificial Sequence: Synthetic oligonucleotide
gagcaauguaugu

SEQ ID NO: 154178 - RNA, 14 nt, Artificial Sequence
  Description of Artificial Sequence: Synthetic oligonucleotide
aaagcacauauaua

SEQ ID NO: 154179 - RNA, 14 nt, Artificial Sequence
  Description of Artificial Sequence: Synthetic oligonucleotide
guaauaguuucucc

SEQ ID NO: 154180 - RNA, 13 nt, Artificial Sequence
  Description of Artificial Sequence: Synthetic oligonucleotide
aguuucuccaaau

SEQ ID NO: 154181 - RNA, 13 nt, Artificial Sequence
  Description of Artificial Sequence: Synthetic oligonucleotide
uacuuccuagaaa

SEQ ID NO: 154182 - RNA, 13 nt, Artificial Sequence
  Description of Artificial Sequence: Synthetic oligonucleotide
uacaccauauaug

SEQ ID NO: 154183 - RNA, 14 nt, Artificial Sequence
  Description of Artificial Sequence: Synthetic oligonucleotide
auauaugaauggag

SEQ ID NO: 154184 - RNA, 13 nt, Artificial Sequence
  Description of Artificial Sequence: Synthetic oligonucleotide
acgagaagaagau

SEQ ID NO: 154185 - RNA, 13 nt, Artificial Sequence
  Description of Artificial Sequence: Synthetic oligonucleotide
ucauuuacaggga

SEQ ID NO: 154186 - RNA, 13 nt, Artificial Sequence
  Description of Artificial Sequence: Synthetic oligonucleotide
cauuuacagggac

SEQ ID NO: 154187 - RNA, 10 nt, Artificial Sequence
  Description of Artificial Sequence: Synthetic oligonucleotide
agggaccuga

SEQ ID NO: 154188 - RNA, 14 nt, Artificial Sequence
  Description of Artificial Sequence: Synthetic oligonucleotide
uguuugacugcauc

SEQ ID NO: 154189 - RNA, 13 nt, Artificial Sequence
  Description of Artificial Sequence: Synthetic oligonucleotide
uuugacugcaucg

SEQ ID NO: 154190 - RNA, 12 nt, Artificial Sequence
  Description of Artificial Sequence: Synthetic oligonucleotide
gaguucacaggg

SEQ ID NO: 154191 - RNA, 13 nt, Artificial Sequence
  Description of Artificial Sequence: Synthetic oligonucleotide
ggcaccucugucc

SEQ ID NO: 154192 - RNA, 15 nt, Artificial Sequence
  Description of Artificial Sequence: Synthetic oligonucleotide
gguuugucuuuuuaa

SEQ ID NO: 154193 - RNA, 14 nt, Artificial Sequence
  Description of Artificial Sequence: Synthetic oligonucleotide
uuugucuuuuuaag

SEQ ID NO: 154194 - RNA, 13 nt, Artificial Sequence
  Description of Artificial Sequence: Synthetic oligonucleotide
ccuaaagguuguc

SEQ ID NO: 154195 - RNA, 12 nt, Artificial Sequence
  Description of Artificial Sequence: Synthetic oligonucleotide
aagguugucgac

SEQ ID NO: 154196 - RNA, 13 nt, Artificial Sequence
  Description of Artificial Sequence: Synthetic oligonucleotide
accuggcaauugu

SEQ ID NO: 154197 - RNA, 12 nt, Artificial Sequence
  Description of Artificial Sequence: Synthetic oligonucleotide
aguggugcgagg

SEQ ID NO: 154198 - RNA, 13 nt, Artificial Sequence
  Description of Artificial Sequence: Synthetic oligonucleotide
agagacaugaaau

SEQ ID NO: 154199 - RNA, 13 nt, Artificial Sequence
  Description of Artificial Sequence: Synthetic oligonucleotide
auauauuucucca

SEQ ID NO: 154200 - RNA, 10 nt, Artificial Sequence
  Description of Artificial Sequence: Synthetic oligonucleotide
caugaaggcu

SEQ ID NO: 154201 - RNA, 11 nt, Artificial Sequence
  Description of Artificial Sequence: Synthetic oligonucleotide
gcuggaguggu

SEQ ID NO: 154202 - RNA, 11 nt, Artificial Sequence
  Description of Artificial Sequence: Synthetic oligonucleotide
aggaagagagg

SEQ ID NO: 154203 - RNA, 12 nt, Artificial Sequence
  Description of Artificial Sequence: Synthetic oligonucleotide
cuugcaucgggc

SEQ ID NO: 154204 - RNA, 13 nt, Artificial Sequence
  Description of Artificial Sequence: Synthetic oligonucleotide
auauccuacugug

SEQ ID NO: 154205 - RNA, 13 nt, Artificial Sequence
  Description of Artificial Sequence: Synthetic oligonucleotide
uccuacuguguaa

SEQ ID NO: 154206 - RNA, 12 nt, Artificial Sequence
  Description of Artificial Sequence: Synthetic oligonucleotide
ccuuguagugua

SEQ ID NO: 154207 - RNA, 13 nt, Artificial Sequence
  Description of Artificial Sequence: Synthetic oligonucleotide
ucuuuguugauug

SEQ ID NO: 154208 - RNA, 14 nt, Artificial Sequence
  Description of Artificial Sequence: Synthetic oligonucleotide
uuuguugauugaaa

SEQ ID NO: 154209 - RNA, 15 nt, Artificial Sequence
  Description of Artificial Sequence: Synthetic oligonucleotide
uucuuuuucuuccau

SEQ ID NO: 154210 - RNA, 13 nt, Artificial Sequence
  Description of Artificial Sequence: Synthetic oligonucleotide
aaucuuccuucua

SEQ ID NO: 154211 - RNA, 13 nt, Artificial Sequence
  Description of Artificial Sequence: Synthetic oligonucleotide
uugaaugcuucau

SEQ ID NO: 154212 - RNA, 13 nt, Artificial Sequence
  Description of Artificial Sequence: Synthetic oligonucleotide
ugaaugcuucaug

SEQ ID NO: 154213 - RNA, 13 nt, Artificial Sequence
  Description of Artificial Sequence: Synthetic oligonucleotide
aauucuacuuuga

SEQ ID NO: 154214 - RNA, 13 nt, Artificial Sequence
  Description of Artificial Sequence: Synthetic oligonucleotide
agcaacuacagac

SEQ ID NO: 154215 - RNA, 13 nt, Artificial Sequence
  Description of Artificial Sequence: Synthetic oligonucleotide
gaccaaggucaac

SEQ ID NO: 154216 - RNA, 13 nt, Artificial Sequence
  Description of Artificial Sequence: Synthetic oligonucleotide
cgacuaucucgac

SEQ ID NO: 154217 - RNA, 13 nt, Artificial Sequence
  Description of Artificial Sequence: Synthetic oligonucleotide
aaccuucccaaac

SEQ ID NO: 154218 - RNA, 14 nt, Artificial Sequence
  Description of Artificial Sequence: Synthetic oligonucleotide
ccaagcuuagaacu

SEQ ID NO: 154219 - RNA, 15 nt, Artificial Sequence
  Description of Artificial Sequence: Synthetic oligonucleotide
agcuuagaacuuuaa

SEQ ID NO: 154220 - RNA, 11 nt, Artificial Sequence
  Description of Artificial Sequence: Synthetic oligonucleotide
aagaccaccac

SEQ ID NO: 154221 - RNA, 14 nt, Artificial Sequence
  Description of Artificial Sequence: Synthetic oligonucleotide
gcgagaaauaaagu

SEQ ID NO: 154222 - RNA, 14 nt, Artificial Sequence
  Description of Artificial Sequence: Synthetic oligonucleotide
cgagaaauaaaguu

SEQ ID NO: 154223 - RNA, 12 nt, Artificial Sequence
  Description of Artificial Sequence: Synthetic oligonucleotide
aggaaaugaucc

SEQ ID NO: 154224 - RNA, 13 nt, Artificial Sequence
  Description of Artificial Sequence: Synthetic oligonucleotide
gaagaaaugaaac

SEQ ID NO: 154225 - RNA, 13 nt, Artificial Sequence
  Description of Artificial Sequence: Synthetic oligonucleotide
guuuccauccucc

SEQ ID NO: 154226 - RNA, 15 nt, Artificial Sequence
  Description of Artificial Sequence: Synthetic oligonucleotide
acugaaaaucuuuga

SEQ ID NO: 154227 - RNA, 11 nt, Artificial Sequence
  Description of Artificial Sequence: Synthetic oligonucleotide
ugccguucagg

SEQ ID NO: 154228 - RNA, 13 nt, Artificial Sequence
  Description of Artificial Sequence: Synthetic oligonucleotide
caggguccagaag

SEQ ID NO: 154229 - RNA, 13 nt, Artificial Sequence
  Description of Artificial Sequence: Synthetic oligonucleotide
ucaagacugcuug

SEQ ID NO: 154230 - RNA, 13 nt, Artificial Sequence
  Description of Artificial Sequence: Synthetic oligonucleotide
uccaugucuuugg

SEQ ID NO: 154231 - RNA, 11 nt, Artificial Sequence
  Description of Artificial Sequence: Synthetic oligonucleotide
gccugaaacac

SEQ ID NO: 154232 - RNA, 12 nt, Artificial Sequence
  Description of Artificial Sequence: Synthetic oligonucleotide
ucucuguaccuc

SEQ ID NO: 154233 - RNA, 12 nt, Artificial Sequence
  Description of Artificial Sequence: Synthetic oligonucleotide
agcaagacaaga

SEQ ID NO: 154234 - RNA, 13 nt, Artificial Sequence
  Description of Artificial Sequence: Synthetic oligonucleotide
gcaagacaagaaa

SEQ ID NO: 154235 - RNA, 12 nt, Artificial Sequence
  Description of Artificial Sequence: Synthetic oligonucleotide
uguacaagaucc

SEQ ID NO: 154236 - RNA, 12 nt, Artificial Sequence
  Description of Artificial Sequence: Synthetic oligonucleotide
cguacuugcaga

SEQ ID NO: 154237 - RNA, 13 nt, Artificial Sequence
  Description of Artificial Sequence: Synthetic oligonucleotide
cgaucgauacaga

SEQ ID NO: 154238 - RNA, 13 nt, Artificial Sequence
  Description of Artificial Sequence: Synthetic oligonucleotide
uauaaaaauaaau

SEQ ID NO: 154239 - RNA, 13 nt, Artificial Sequence
  Description of Artificial Sequence: Synthetic oligonucleotide
uaaaaauaaauau

SEQ ID NO: 154240 - RNA, 13 nt, Artificial Sequence
  Description of Artificial Sequence: Synthetic oligonucleotide
uuugacugcugug

SEQ ID NO: 154241 - RNA, 13 nt, Artificial Sequence
  Description of Artificial Sequence: Synthetic oligonucleotide
ggagaugagagac

SEQ ID NO: 154242 - RNA, 10 nt, Artificial Sequence
  Description of Artificial Sequence: Synthetic oligonucleotide
ucccacuugg

SEQ ID NO: 154243 - RNA, 10 nt, Artificial Sequence
  Description of Artificial Sequence: Synthetic oligonucleotide
guucacggcc

SEQ ID NO: 154244 - RNA, 12 nt, Artificial Sequence
  Description of Artificial Sequence: Synthetic oligonucleotide
accaucacacca

SEQ ID NO: 154245 - RNA, 10 nt, Artificial Sequence
  Description of Artificial Sequence: Synthetic oligonucleotide
cugcggguuu

SEQ ID NO: 154246 - RNA, 9 nt, Artificial Sequence
  Description of Artificial Sequence: Synthetic oligonucleotide
uccaguuug

SEQ ID NO: 154247 - RNA, 12 nt, Artificial Sequence
  Description of Artificial Sequence: Synthetic oligonucleotide
uuaaggacuucu

SEQ ID NO: 154248 - RNA, 12 nt, Artificial Sequence
  Description of Artificial Sequence: Synthetic oligonucleotide
agugggacagag

SEQ ID NO: 154249 - RNA, 13 nt, Artificial Sequence
  Description of Artificial Sequence: Synthetic oligonucleotide
auuuguuauugug

SEQ ID NO: 154250 - RNA, 12 nt, Artificial Sequence
  Description of Artificial Sequence: Synthetic oligonucleotide
ucaaaugcauuu

SEQ ID NO: 154251 - RNA, 9 nt, Artificial Sequence
  Description of Artificial Sequence: Synthetic oligonucleotide
aggaaagcc

SEQ ID NO: 154252 - RNA, 10 nt, Artificial Sequence
  Description of Artificial Sequence: Synthetic oligonucleotide
ggaaagcccu

SEQ ID NO: 154253 - RNA, 11 nt, Artificial Sequence
  Description of Artificial Sequence: Synthetic oligonucleotide
ccagcauggcc

SEQ ID NO: 154254 - RNA, 10 nt, Artificial Sequence
  Description of Artificial Sequence: Synthetic oligonucleotide
uucucccuga

SEQ ID NO: 154255 - RNA, 11 nt, Artificial Sequence
  Description of Artificial Sequence: Synthetic oligonucleotide
aagaagcccuu

SEQ ID NO: 154256 - RNA, 11 nt, Artificial Sequence
  Description of Artificial Sequence: Synthetic oligonucleotide
gaagcccuuca

SEQ ID NO: 154257 - RNA, 10 nt, Artificial Sequence
  Description of Artificial Sequence: Synthetic oligonucleotide
cccuucagcg

SEQ ID NO: 154258 - RNA, 10 nt, Artificial Sequence
  Description of Artificial Sequence: Synthetic oligonucleotide
cuucagcggc

SEQ ID NO: 154259 - RNA, 11 nt, Artificial Sequence
  Description of Artificial Sequence: Synthetic oligonucleotide
cagcggccagu

SEQ ID NO: 154260 - RNA, 11 nt, Artificial Sequence
  Description of Artificial Sequence: Synthetic oligonucleotide
gaaaagcuccg

SEQ ID NO: 154261 - RNA, 10 nt, Artificial Sequence
  Description of Artificial Sequence: Synthetic oligonucleotide
aaagcuccgg

SEQ ID NO: 154262 - RNA, 12 nt, Artificial Sequence
  Description of Artificial Sequence: Synthetic oligonucleotide
gucaacagucug

SEQ ID NO: 154263 - RNA, 12 nt, Artificial Sequence
  Description of Artificial Sequence: Synthetic oligonucleotide
agaguucaaaag

SEQ ID NO: 154264 - RNA, 12 nt, Artificial Sequence
  Description of Artificial Sequence: Synthetic oligonucleotide
gaguucaaaagc

SEQ ID NO: 154265 - RNA, 11 nt, Artificial Sequence
  Description of Artificial Sequence: Synthetic oligonucleotide
ucaaaagcccu

SEQ ID NO: 154266 - RNA, 11 nt, Artificial Sequence
  Description of Artificial Sequence: Synthetic oligonucleotide
caaaagcccuu

SEQ ID NO: 154267 - RNA, 11 nt, Artificial Sequence
  Description of Artificial Sequence: Synthetic oligonucleotide
aaagcccuuca

SEQ ID NO: 154268 - RNA, 11 nt, Artificial Sequence
  Description of Artificial Sequence: Synthetic oligonucleotide
aagcccuucag

SEQ ID NO: 154269 - RNA, 12 nt, Artificial Sequence
  Description of Artificial Sequence: Synthetic oligonucleotide
ugaagccgcucg

SEQ ID NO: 154270 - RNA, 11 nt, Artificial Sequence
  Description of Artificial Sequence: Synthetic oligonucleotide
acgccagucaa

SEQ ID NO: 154271 - RNA, 12 nt, Artificial Sequence
  Description of Artificial Sequence: Synthetic oligonucleotide
ucuuggugcgug

SEQ ID NO: 154272 - RNA, 13 nt, Artificial Sequence
  Description of Artificial Sequence: Synthetic oligonucleotide
uuggauucaucag

SEQ ID NO: 154273 - RNA, 12 nt, Artificial Sequence
  Description of Artificial Sequence: Synthetic oligonucleotide
ggaauaccuaag

SEQ ID NO: 154274 - RNA, 11 nt, Artificial Sequence
  Description of Artificial Sequence: Synthetic oligonucleotide
uuugaggcuca

SEQ ID NO: 154275 - RNA, 10 nt, Artificial Sequence
  Description of Artificial Sequence: Synthetic oligonucleotide
cuacaauugg

SEQ ID NO: 154276 - RNA, 11 nt, Artificial Sequence
  Description of Artificial Sequence: Synthetic oligonucleotide
aguuaggagcc

SEQ ID NO: 154277 - RNA, 12 nt, Artificial Sequence
  Description of Artificial Sequence: Synthetic oligonucleotide
gucaauauccac

SEQ ID NO: 154278 - RNA, 12 nt, Artificial Sequence
  Description of Artificial Sequence: Synthetic oligonucleotide
uguucagucaca

SEQ ID NO: 154279 - RNA, 11 nt, Artificial Sequence
  Description of Artificial Sequence: Synthetic oligonucleotide
cacacacauac

SEQ ID NO: 154280 - RNA, 11 nt, Artificial Sequence
  Description of Artificial Sequence: Synthetic oligonucleotide
uccuuuugcuu

SEQ ID NO: 154281 - RNA, 15 nt, Artificial Sequence
  Description of Artificial Sequence: Synthetic oligonucleotide
uuuaaaguaauuuuu

SEQ ID NO: 154282 - RNA, 12 nt, Artificial Sequence
  Description of Artificial Sequence: Synthetic oligonucleotide
aacagucaaugg

SEQ ID NO: 154283 - RNA, 12 nt, Artificial Sequence
  Description of Artificial Sequence: Synthetic oligonucleotide
cgacaaaccaau

SEQ ID NO: 154284 - RNA, 11 nt, Artificial Sequence
  Description of Artificial Sequence: Synthetic oligonucleotide
cugcuaccacu

SEQ ID NO: 154285 - RNA, 12 nt, Artificial Sequence
  Description of Artificial Sequence: Synthetic oligonucleotide
caagcggucuua

SEQ ID NO: 154286 - RNA, 12 nt, Artificial Sequence
  Description of Artificial Sequence: Synthetic oligonucleotide
gucuuaccggcu

SEQ ID NO: 154287 - RNA, 10 nt, Artificial Sequence
  Description of Artificial Sequence: Synthetic oligonucleotide
auggguuacc

SEQ ID NO: 154288 - RNA, 10 nt, Artificial Sequence
  Description of Artificial Sequence: Synthetic oligonucleotide
uuaccugcga

SEQ ID NO: 154289 - RNA, 11 nt, Artificial Sequence
  Description of Artificial Sequence: Synthetic oligonucleotide
aucuugcugag

SEQ ID NO: 154290 - RNA, 12 nt, Artificial Sequence
  Description of Artificial Sequence: Synthetic oligonucleotide
gcauaaaacagu

SEQ ID NO: 154291 - RNA, 11 nt, Artificial Sequence
  Description of Artificial Sequence: Synthetic oligonucleotide
uccuuuauccu

SEQ ID NO: 154292 - RNA, 11 nt, Artificial Sequence
  Description of Artificial Sequence: Synthetic oligonucleotide
aacgcaaguug

SEQ ID NO: 154293 - RNA, 12 nt, Artificial Sequence
  Description of Artificial Sequence: Synthetic oligonucleotide
aacugaaaccau

SEQ ID NO: 154294 - RNA, 13 nt, Artificial Sequence
  Description of Artificial Sequence: Synthetic oligonucleotide
cuuuguuaaauau

SEQ ID NO: 154295 - RNA, 13 nt, Artificial Sequence
  Description of Artificial Sequence: Synthetic oligonucleotide
uauauuaaaaguu

SEQ ID NO: 154296 - RNA, 12 nt, Artificial Sequence
  Description of Artificial Sequence: Synthetic oligonucleotide
uuuugacuuaac

SEQ ID NO: 154297 - RNA, 12 nt, Artificial Sequence
  Description of Artificial Sequence: Synthetic oligonucleotide
caaacucagcac

SEQ ID NO: 154298 - RNA, 10 nt, Artificial Sequence
  Description of Artificial Sequence: Synthetic oligonucleotide
gcugaccuca

SEQ ID NO: 154299 - RNA, 13 nt, Artificial Sequence
  Description of Artificial Sequence: Synthetic oligonucleotide
uuauucagaucgc

SEQ ID NO: 154300 - RNA, 12 nt, Artificial Sequence
  Description of Artificial Sequence: Synthetic oligonucleotide
ggguucugggau

SEQ ID NO: 154301 - RNA, 14 nt, Artificial Sequence
  Description of Artificial Sequence: Synthetic oligonucleotide
uauuggaaauuaug

SEQ ID NO: 154302 - RNA, 12 nt, Artificial Sequence
  Description of Artificial Sequence: Synthetic oligonucleotide
uggaagcacuag

SEQ ID NO: 154303 - RNA, 12 nt, Artificial Sequence
  Description of Artificial Sequence: Synthetic oligonucleotide
uuuuuaugugga

SEQ ID NO: 154304 - RNA, 11 nt, Artificial Sequence
  Description of Artificial Sequence: Synthetic oligonucleotide
gaauugguaga

SEQ ID NO: 154305 - RNA, 12 nt, Artificial Sequence
  Description of Artificial Sequence: Synthetic oligonucleotide
uagacuuggaga

SEQ ID NO: 154306 - RNA, 12 nt, Artificial Sequence
  Description of Artificial Sequence: Synthetic oligonucleotide
uacaguauucca

SEQ ID NO: 154307 - RNA, 14 nt, Artificial Sequence
  Description of Artificial Sequence: Synthetic oligonucleotide
cacugaugaauuaa

SEQ ID NO: 154308 - RNA, 11 nt, Artificial Sequence
  Description of Artificial Sequence: Synthetic oligonucleotide
cacaucaucac

SEQ ID NO: 154309 - RNA, 12 nt, Artificial Sequence
  Description of Artificial Sequence: Synthetic oligonucleotide
ucaccaaacaga

SEQ ID NO: 154310 - RNA, 11 nt, Artificial Sequence
  Description of Artificial Sequence: Synthetic oligonucleotide
gaacaugaugg

SEQ ID NO: 154311 - RNA, 11 nt, Artificial Sequence
  Description of Artificial Sequence: Synthetic oligonucleotide
auguagacugc

SEQ ID NO: 154312 - RNA, 12 nt, Artificial Sequence
  Description of Artificial Sequence: Synthetic oligonucleotide
gaucuauuuaug

SEQ ID NO: 154313 - RNA, 11 nt, Artificial Sequence
  Description of Artificial Sequence: Synthetic oligonucleotide
cacuauuauca

SEQ ID NO: 154314 - RNA, 10 nt, Artificial Sequence
  Description of Artificial Sequence: Synthetic oligonucleotide
ucaguucugc

SEQ ID NO: 154315 - RNA, 12 nt, Artificial Sequence
  Description of Artificial Sequence: Synthetic oligonucleotide
gauuaaaccuac

SEQ ID NO: 154316 - RNA, 12 nt, Artificial Sequence
  Description of Artificial Sequence: Synthetic oligonucleotide
uaaaauccuucu

SEQ ID NO: 154317 - RNA, 11 nt, Artificial Sequence
  Description of Artificial Sequence: Synthetic oligonucleotide
augcuguagac

SEQ ID NO: 154318 - RNA, 12 nt, Artificial Sequence
  Description of Artificial Sequence: Synthetic oligonucleotide
ugauaggaauag

SEQ ID NO: 154319 - RNA, 10 nt, Artificial Sequence
  Description of Artificial Sequence: Synthetic oligonucleotide
auggcccuga

SEQ ID NO: 154320 - RNA, 10 nt, Artificial Sequence
  Description of Artificial Sequence: Synthetic oligonucleotide
uccucaagca

SEQ ID NO: 154321 - RNA, 9 nt, Artificial Sequence
  Description of Artificial Sequence: Synthetic oligonucleotide
uucagccca

SEQ ID NO: 154322 - RNA, 10 nt, Artificial Sequence
  Description of Artificial Sequence: Synthetic oligonucleotide
cugcugaacc

SEQ ID NO: 154323 - RNA, 11 nt, Artificial Sequence
  Description of Artificial Sequence: Synthetic oligonucleotide
aguucucuuca

SEQ ID NO: 154324 - RNA, 10 nt, Artificial Sequence
  Description of Artificial Sequence: Synthetic oligonucleotide
cagccuagag

SEQ ID NO: 154325 - RNA, 12 nt, Artificial Sequence
  Description of Artificial Sequence: Synthetic oligonucleotide
ucugugaagugu

SEQ ID NO: 154326 - RNA, 13 nt, Artificial Sequence
  Description of Artificial Sequence: Synthetic oligonucleotide
gagaaaauuucaa

SEQ ID NO: 154327 - RNA, 10 nt, Artificial Sequence
  Description of Artificial Sequence: Synthetic oligonucleotide
auccuccuga

SEQ ID NO: 154328 - RNA, 11 nt, Artificial Sequence
  Description of Artificial Sequence: Synthetic oligonucleotide
ugacaucauau

SEQ ID NO: 154329 - RNA, 12 nt, Artificial Sequence
  Description of Artificial Sequence: Synthetic oligonucleotide
aucuucaucaua

SEQ ID NO: 154330 - RNA, 12 nt, Artificial Sequence
  Description of Artificial Sequence: Synthetic oligonucleotide
acuagcuauuaa

SEQ ID NO: 154331 - RNA, 13 nt, Artificial Sequence
  Description of Artificial Sequence: Synthetic oligonucleotide
cucuacuaaaaau

SEQ ID NO: 154332 - RNA, 11 nt, Artificial Sequence
  Description of Artificial Sequence: Synthetic oligonucleotide
cuaucucgccu

SEQ ID NO: 154333 - RNA, 12 nt, Artificial Sequence
  Description of Artificial Sequence: Synthetic oligonucleotide
uucgguccaguu

SEQ ID NO: 154334 - RNA, 10 nt, Artificial Sequence
  Description of Artificial Sequence: Synthetic oligonucleotide
auguagccgc

SEQ ID NO: 154335 - RNA, 11 nt, Artificial Sequence
  Description of Artificial Sequence: Synthetic oligonucleotide
gaggagacuug

SEQ ID NO: 154336 - RNA, 11 nt, Artificial Sequence
  Description of Artificial Sequence: Synthetic oligonucleotide
aguagugagga

SEQ ID NO: 154337 - RNA, 13 nt, Artificial Sequence
  Description of Artificial Sequence: Synthetic oligonucleotide
agaugaguacaaa

SEQ ID NO: 154338 - RNA, 12 nt, Artificial Sequence
  Description of Artificial Sequence: Synthetic oligonucleotide
uuguuaaugggc

SEQ ID NO: 154339 - RNA, 12 nt, Artificial Sequence
  Description of Artificial Sequence: Synthetic oligonucleotide
uuuuaauuuauu

SEQ ID NO: 154340 - RNA, 11 nt, Artificial Sequence
  Description of Artificial Sequence: Synthetic oligonucleotide
auuuaaauaug

SEQ ID NO: 154341 - RNA, 12 nt, Artificial Sequence
  Description of Artificial Sequence: Synthetic oligonucleotide
auccuuuguuuc

SEQ ID NO: 154342 - RNA, 13 nt, Artificial Sequence
  Description of Artificial Sequence: Synthetic oligonucleotide
gucuaaguguuug

SEQ ID NO: 154343 - RNA, 11 nt, Artificial Sequence
  Description of Artificial Sequence: Synthetic oligonucleotide
ccugugacaaa

SEQ ID NO: 154344 - RNA, 12 nt, Artificial Sequence
  Description of Artificial Sequence: Synthetic oligonucleotide
caggcugaauua

SEQ ID NO: 154345 - RNA, 13 nt, Artificial Sequence
  Description of Artificial Sequence: Synthetic oligonucleotide
ucauucuuacaau

SEQ ID NO: 154346 - RNA, 14 nt, Artificial Sequence
  Description of Artificial Sequence: Synthetic oligonucleotide
cauucuuacaauug

SEQ ID NO: 154347 - RNA, 11 nt, Artificial Sequence
  Description of Artificial Sequence: Synthetic oligonucleotide
agagaguguac

SEQ ID NO: 154348 - RNA, 11 nt, Artificial Sequence
  Description of Artificial Sequence: Synthetic oligonucleotide
gaacucagcag

SEQ ID NO: 154349 - RNA, 12 nt, Artificial Sequence
  Description of Artificial Sequence: Synthetic oligonucleotide
uuauuuucagua

SEQ ID NO: 154350 - RNA, 11 nt, Artificial Sequence
  Description of Artificial Sequence: Synthetic oligonucleotide
cuuaaauggaa

SEQ ID NO: 154351 - RNA, 12 nt, Artificial Sequence
  Description of Artificial Sequence: Synthetic oligonucleotide
gccuaaaauugu

SEQ ID NO: 154352 - RNA, 12 nt, Artificial Sequence
  Description of Artificial Sequence: Synthetic oligonucleotide
acuaacaucugg

SEQ ID NO: 154353 - RNA, 11 nt, Artificial Sequence
  Description of Artificial Sequence: Synthetic oligonucleotide
gacugugagcu

SEQ ID NO: 154354 - RNA, 13 nt, Artificial Sequence
  Description of Artificial Sequence: Synthetic oligonucleotide
gcuuuuuauuaau

SEQ ID NO: 154355 - RNA, 12 nt, Artificial Sequence
  Description of Artificial Sequence: Synthetic oligonucleotide
ucuucuuacauu

SEQ ID NO: 154356 - RNA, 14 nt, Artificial Sequence
  Description of Artificial Sequence: Synthetic oligonucleotide
auuuguaaaaaugu

SEQ ID NO: 154357 - RNA, 14 nt, Artificial Sequence
  Description of Artificial Sequence: Synthetic oligonucleotide
ucuuaauucauauu

SEQ ID NO: 154358 - RNA, 12 nt, Artificial Sequence
  Description of Artificial Sequence: Synthetic oligonucleotide
aacuaaucauga

SEQ ID NO: 154359 - RNA, 11 nt, Artificial Sequence
  Description of Artificial Sequence: Synthetic oligonucleotide
cugcucuuggg

SEQ ID NO: 154360 - RNA, 12 nt, Artificial Sequence
  Description of Artificial Sequence: Synthetic oligonucleotide
aguagcuuugag

SEQ ID NO: 154361 - RNA, 13 nt, Artificial Sequence
  Description of Artificial Sequence: Synthetic oligonucleotide
acguaauauuuca

SEQ ID NO: 154362 - RNA, 12 nt, Artificial Sequence
  Description of Artificial Sequence: Synthetic oligonucleotide
auucucuucacu

SEQ ID NO: 154363 - RNA, 13 nt, Artificial Sequence
  Description of Artificial Sequence: Synthetic oligonucleotide
uaaugcuaagaaa

SEQ ID NO: 154364 - RNA, 11 nt, Artificial Sequence
  Description of Artificial Sequence: Synthetic oligonucleotide
cugaaaaucaa

SEQ ID NO: 154365 - RNA, 13 nt, Artificial Sequence
  Description of Artificial Sequence: Synthetic oligonucleotide
auaugauuacuuu

SEQ ID NO: 154366 - RNA, 13 nt, Artificial Sequence
  Description of Artificial Sequence: Synthetic oligonucleotide
auuuuguucuaca

SEQ ID NO: 154367 - RNA, 11 nt, Artificial Sequence
  Description of Artificial Sequence: Synthetic oligonucleotide
ccgggacucuc

SEQ ID NO: 154368 - RNA, 13 nt, Artificial Sequence
  Description of Artificial Sequence: Synthetic oligonucleotide
cuuuaaaguaaag

SEQ ID NO: 154369 - RNA, 12 nt, Artificial Sequence
  Description of Artificial Sequence: Synthetic oligonucleotide
cuggaagccugg

SEQ ID NO: 154370 - RNA, 13 nt, Artificial Sequence
  Description of Artificial Sequence: Synthetic oligonucleotide
aaacaaaagagag

SEQ ID NO: 154371 - RNA, 12 nt, Artificial Sequence
  Description of Artificial Sequence: Synthetic oligonucleotide
ucaguuaugccg

SEQ ID NO: 154372 - RNA, 12 nt, Artificial Sequence
  Description of Artificial Sequence: Synthetic oligonucleotide
aaaagaagucca

SEQ ID NO: 154373 - RNA, 10 nt, Artificial Sequence
  Description of Artificial Sequence: Synthetic oligonucleotide
ggugagguua

SEQ ID NO: 154374 - RNA, 10 nt, Artificial Sequence
  Description of Artificial Sequence: Synthetic oligonucleotide
ggaagaggac

SEQ ID NO: 154375 - RNA, 12 nt, Artificial Sequence
  Description of Artificial Sequence: Synthetic oligonucleotide
agcaaguauugu

SEQ ID NO: 154376 - RNA, 11 nt, Artificial Sequence
  Description of Artificial Sequence: Synthetic oligonucleotide
uuguagcacuc

SEQ ID NO: 154377 - RNA, 13 nt, Artificial Sequence
  Description of Artificial Sequence: Synthetic oligonucleotide
caaaaccacaaau

SEQ ID NO: 154378 - RNA, 11 nt, Artificial Sequence
  Description of Artificial Sequence: Synthetic oligonucleotide
aagcccauaca

SEQ ID NO: 154379 - RNA, 10 nt, Artificial Sequence
  Description of Artificial Sequence: Synthetic oligonucleotide
gcccauacag

SEQ ID NO: 154380 - RNA, 11 nt, Artificial Sequence
  Description of Artificial Sequence: Synthetic oligonucleotide
agaaaccuucc

SEQ ID NO: 154381 - RNA, 9 nt, Artificial Sequence
  Description of Artificial Sequence: Synthetic oligonucleotide
uauaccuac

SEQ ID NO: 154382 - RNA, 12 nt, Artificial Sequence
  Description of Artificial Sequence: Synthetic oligonucleotide
ccaguuuucgga

SEQ ID NO: 154383 - RNA, 8 nt, Artificial Sequence
  Description of Artificial Sequence: Synthetic oligonucleotide
gaacaggg

SEQ ID NO: 154384 - RNA, 12 nt, Artificial Sequence
  Description of Artificial Sequence: Synthetic oligonucleotide
uaacuuuccagu

SEQ ID NO: 154385 - RNA, 13 nt, Artificial Sequence
  Description of Artificial Sequence: Synthetic oligonucleotide
aaguuugguuuug

SEQ ID NO: 154386 - RNA, 11 nt, Artificial Sequence
  Description of Artificial Sequence: Synthetic oligonucleotide
uucccacugua

SEQ ID NO: 154387 - RNA, 12 nt, Artificial Sequence
  Description of Artificial Sequence: Synthetic oligonucleotide
gauaccauauga

SEQ ID NO: 154388 - RNA, 10 nt, Artificial Sequence
  Description of Artificial Sequence: Synthetic oligonucleotide
acaugggcug

SEQ ID NO: 154389 - RNA, 12 nt, Artificial Sequence
  Description of Artificial Sequence: Synthetic oligonucleotide
aacuuuuucaua

SEQ ID NO: 154390 - RNA, 11 nt, Artificial Sequence
  Description of Artificial Sequence: Synthetic oligonucleotide
augaggccgga

SEQ ID NO: 154391 - RNA, 10 nt, Artificial Sequence
  Description of Artificial Sequence: Synthetic oligonucleotide
cugcauuugu

SEQ ID NO: 154392 - RNA, 12 nt, Artificial Sequence
  Description of Artificial Sequence: Synthetic oligonucleotide
auguuuacuacc

SEQ ID NO: 154393 - RNA, 14 nt, Artificial Sequence
  Description of Artificial Sequence: Synthetic oligonucleotide
auuuuuugaugaaa

SEQ ID NO: 154394 - RNA, 13 nt, Artificial Sequence
  Description of Artificial Sequence: Synthetic oligonucleotide
agugugugaauuu

SEQ ID NO: 154395 - RNA, 12 nt, Artificial Sequence
  Description of Artificial Sequence: Synthetic oligonucleotide
agcaauguaugu

SEQ ID NO: 154396 - RNA, 13 nt, Artificial Sequence
  Description of Artificial Sequence: Synthetic oligonucleotide
aagcacauauaua

SEQ ID NO: 154397 - RNA, 13 nt, Artificial Sequence
  Description of Artificial Sequence: Synthetic oligonucleotide
uaauaguuucucc

SEQ ID NO: 154398 - RNA, 12 nt, Artificial Sequence
  Description of Artificial Sequence: Synthetic oligonucleotide
guuucuccaaau

SEQ ID NO: 154399 - RNA, 12 nt, Artificial Sequence
  Description of Artificial Sequence: Synthetic oligonucleotide
acuuccuagaaa

SEQ ID NO: 154400 - RNA, 12 nt, Artificial Sequence
  Description of Artificial Sequence: Synthetic oligonucleotide
acaccauauaug

SEQ ID NO: 154401 - RNA, 13 nt, Artificial Sequence
  Description of Artificial Sequence: Synthetic oligonucleotide
uauaugaauggag

SEQ ID NO: 154402 - RNA, 12 nt, Artificial Sequence
  Description of Artificial Sequence: Synthetic oligonucleotide
cauuuacaggga

SEQ ID NO: 154403 - RNA, 12 nt, Artificial Sequence
  Description of Artificial Sequence: Synthetic oligonucleotide
auuuacagggac

SEQ ID NO: 154404 - RNA, 9 nt, Artificial Sequence
  Description of Artificial Sequence: Synthetic oligonucleotide
gggaccuga

SEQ ID NO: 154405 - RNA, 13 nt, Artificial Sequence
  Description of Artificial Sequence: Synthetic oligonucleotide
guuugacugcauc

SEQ ID NO: 154406 - RNA, 12 nt, Artificial Sequence
  Description of Artificial Sequence: Synthetic oligonucleotide
uugacugcaucg

SEQ ID NO: 154407 - RNA, 11 nt, Artificial Sequence
  Description of Artificial Sequence: Synthetic oligonucleotide
aguucacaggg

SEQ ID NO: 154408 - RNA, 12 nt, Artificial Sequence
  Description of Artificial Sequence: Synthetic oligonucleotide
gcaccucugucc

SEQ ID NO: 154409 - RNA, 14 nt, Artificial Sequence
  Description of Artificial Sequence: Synthetic oligonucleotide
guuugucuuuuuaa

SEQ ID NO: 154410 - RNA, 13 nt, Artificial Sequence
  Description of Artificial Sequence: Synthetic oligonucleotide
uugucuuuuuaag

SEQ ID NO: 154411 - RNA, 12 nt, Artificial Sequence
  Description of Artificial Sequence: Synthetic oligonucleotide
cuaaagguuguc

SEQ ID NO: 154412 - RNA, 11 nt, Artificial Sequence
  Description of Artificial Sequence: Synthetic oligonucleotide
agguugucgac

SEQ ID NO: 154413 - RNA, 12 nt, Artificial Sequence
  Description of Artificial Sequence: Synthetic oligonucleotide
ccuggcaauugu

SEQ ID NO: 154414 - RNA, 11 nt, Artificial Sequence
  Description of Artificial Sequence: Synthetic oligonucleotide
guggugcgagg

SEQ ID NO: 154415 - RNA, 12 nt, Artificial Sequence
  Description of Artificial Sequence: Synthetic oligonucleotide
gagacaugaaau

SEQ ID NO: 154416 - RNA, 12 nt, Artificial Sequence
  Description of Artificial Sequence: Synthetic oligonucleotide
uauauuucucca

SEQ ID NO: 154417 - RNA, 9 nt, Artificial Sequence
  Description of Artificial Sequence: Synthetic oligonucleotide
augaaggcu

SEQ ID NO: 154418 - RNA, 10 nt, Artificial Sequence
  Description of Artificial Sequence: Synthetic oligonucleotide
cuggaguggu

SEQ ID NO: 154419 - RNA, 10 nt, Artificial Sequence
  Description of Artificial Sequence: Synthetic oligonucleotide
ggaagagagg

SEQ ID NO: 154420 - RNA, 11 nt, Artificial Sequence
  Description of Artificial Sequence: Synthetic oligonucleotide
uugcaucgggc

SEQ ID NO: 154421 - RNA, 12 nt, Artificial Sequence
  Description of Artificial Sequence: Synthetic oligonucleotide
uauccuacugug

SEQ ID NO: 154422 - RNA, 12 nt, Artificial Sequence
  Description of Artificial Sequence: Synthetic oligonucleotide
ccuacuguguaa

SEQ ID NO: 154423 - RNA, 11 nt, Artificial Sequence
  Description of Artificial Sequence: Synthetic oligonucleotide
cuuguagugua

SEQ ID NO: 154424 - RNA, 12 nt, Artificial Sequence
  Description of Artificial Sequence: Synthetic oligonucleotide
cuuuguugauug

SEQ ID NO: 154425 - RNA, 13 nt, Artificial Sequence
  Description of Artificial Sequence: Synthetic oligonucleotide
uuguugauugaaa

SEQ ID NO: 154426 - RNA, 14 nt, Artificial Sequence
  Description of Artificial Sequence: Synthetic oligonucleotide
ucuuuuucuuccau

SEQ ID NO: 154427 - RNA, 12 nt, Artificial Sequence
  Description of Artificial Sequence: Synthetic oligonucleotide
aucuuccuucua

SEQ ID NO: 154428 - RNA, 12 nt, Artificial Sequence
  Description of Artificial Sequence: Synthetic oligonucleotide
ugaaugcuucau

SEQ ID NO: 154429 - RNA, 12 nt, Artificial Sequence
  Description of Artificial Sequence: Synthetic oligonucleotide
gaaugcuucaug

SEQ ID NO: 154430 - RNA, 12 nt, Artificial Sequence
  Description of Artificial Sequence: Synthetic oligonucleotide
auucuacuuuga

SEQ ID NO: 154431 - RNA, 12 nt, Artificial Sequence
  Description of Artificial Sequence: Synthetic oligonucleotide
gcaacuacagac

SEQ ID NO: 154432 - RNA, 12 nt, Artificial Sequence
  Description of Artificial Sequence: Synthetic oligonucleotide
accaaggucaac

SEQ ID NO: 154433 - RNA, 12 nt, Artificial Sequence
  Description of Artificial Sequence: Synthetic oligonucleotide
gacuaucucgac

SEQ ID NO: 154434 - RNA, 12 nt, Artificial Sequence
  Description of Artificial Sequence: Synthetic oligonucleotide
accuucccaaac

SEQ ID NO: 154435 - RNA, 13 nt, Artificial Sequence
  Description of Artificial Sequence: Synthetic oligonucleotide
caagcuuagaacu

SEQ ID NO: 154436 - RNA, 14 nt, Artificial Sequence
  Description of Artificial Sequence: Synthetic oligonucleotide
gcuuagaacuuuaa

SEQ ID NO: 154437 - RNA, 13 nt, Artificial Sequence
  Description of Artificial Sequence: Synthetic oligonucleotide
aacuuuaagcaac

SEQ ID NO: 154438 - RNA, 10 nt, Artificial Sequence
  Description of Artificial Sequence: Synthetic oligonucleotide
agaccaccac

SEQ ID NO: 154439 - RNA, 13 nt, Artificial Sequence
  Description of Artificial Sequence: Synthetic oligonucleotide
cgagaaauaaagu

SEQ ID NO: 154440 - RNA, 13 nt, Artificial Sequence
  Description of Artificial Sequence: Synthetic oligonucleotide
gagaaauaaaguu

SEQ ID NO: 154441 - RNA, 11 nt, Artificial Sequence
  Description of Artificial Sequence: Synthetic oligonucleotide
ggaaaugaucc

SEQ ID NO: 154442 - RNA, 12 nt, Artificial Sequence
  Description of Artificial Sequence: Synthetic oligonucleotide
aagaaaugaaac

SEQ ID NO: 154443 - RNA, 12 nt, Artificial Sequence
  Description of Artificial Sequence: Synthetic oligonucleotide
uuuccauccucc

SEQ ID NO: 154444 - RNA, 14 nt, Artificial Sequence
  Description of Artificial Sequence: Synthetic oligonucleotide
cugaaaaucuuuga

SEQ ID NO: 154445 - RNA, 10 nt, Artificial Sequence
  Description of Artificial Sequence: Synthetic oligonucleotide
gccguucagg

SEQ ID NO: 154446 - RNA, 12 nt, Artificial Sequence
  Description of Artificial Sequence: Synthetic oligonucleotide
aggguccagaag

SEQ ID NO: 154447 - RNA, 12 nt, Artificial Sequence
  Description of Artificial Sequence: Synthetic oligonucleotide
caagacugcuug

SEQ ID NO: 154448 - RNA, 12 nt, Artificial Sequence
  Description of Artificial Sequence: Synthetic oligonucleotide
ccaugucuuugg

SEQ ID NO: 154449 - RNA, 10 nt, Artificial Sequence
  Description of Artificial Sequence: Synthetic oligonucleotide
ccugaaacac

SEQ ID NO: 154450 - RNA, 11 nt, Artificial Sequence
  Description of Artificial Sequence: Synthetic oligonucleotide
cucuguaccuc

SEQ ID NO: 154451 - RNA, 11 nt, Artificial Sequence
  Description of Artificial Sequence: Synthetic oligonucleotide
gcaagacaaga

SEQ ID NO: 154452 - RNA, 12 nt, Artificial Sequence
  Description of Artificial Sequence: Synthetic oligonucleotide
caagacaagaaa

SEQ ID NO: 154453 - RNA, 11 nt, Artificial Sequence
  Description of Artificial Sequence: Synthetic oligonucleotide
guacaagaucc

SEQ ID NO: 154454 - RNA, 11 nt, Artificial Sequence
  Description of Artificial Sequence: Synthetic oligonucleotide
guacuugcaga

SEQ ID NO: 154455 - RNA, 12 nt, Artificial Sequence
  Description of Artificial Sequence: Synthetic oligonucleotide
gaucgauacaga

SEQ ID NO: 154456 - RNA, 12 nt, Artificial Sequence
  Description of Artificial Sequence: Synthetic oligonucleotide
auaaaaauaaau

SEQ ID NO: 154457 - RNA, 12 nt, Artificial Sequence
  Description of Artificial Sequence: Synthetic oligonucleotide
aaaaauaaauau

SEQ ID NO: 154458 - RNA, 12 nt, Artificial Sequence
  Description of Artificial Sequence: Synthetic oligonucleotide
uugacugcugug

SEQ ID NO: 154459 - RNA, 12 nt, Artificial Sequence
  Description of Artificial Sequence: Synthetic oligonucleotide
gagaugagagac

SEQ ID NO: 154460 - RNA, 9 nt, Artificial Sequence
  Description of Artificial Sequence: Synthetic oligonucleotide
cccacuugg

SEQ ID NO: 154461 - RNA, 3720 nt, Homo sapiens
aggauacagcggcuucugcgcgacuuauaagagcuccuugugcggcgccauuuuaagccucucggucuguggcagcagcguuggcccggccccgggagcggagagcgaggggaggcggagacggaggaaggucugaggagcagcuucaguccccgccgagccgccaccgcaggucgaggacggucggacucccgcggcgggaggagccuguuccccugaggguauuugaaguauaccauacaacuguuuugaaaauccagcguggacaauggcuacucaagcugauuugauggaguuggacauggccauggaaccagacagaaaagcggcuguuagucacuggcagcaacagucuuaccuggacucuggaauccauucuggugccacuaccacagcuccuucucugagugguaaaggcaauccugaggaagaggauguggauaccucccaaguccuguaugagugggaacagggauuuucucaguccuucacucaagaacaaguagcugauauugauggacaguaugcaaugacucgagcucagaggguacgagcugcuauguucccugagacauuagaugagggcaugcagaucccaucuacacaguuugaugcugcucaucccacuaauguccagcguuuggcugaaccaucacagaugcugaaacaugcaguuguaaacuugauuaacuaucaagaugaugcagaacuugccacacgugcaaucccugaacugacaaaacugcuaaaugacgaggaccagguggugguuaauaaggcugcaguuaugguccaucagcuuucuaaaaaggaagcuuccagacacgcuaucaugcguucuccucagauggugucugcuauuguacguaccaugcagaauacaaaugauguagaaacagcucguuguaccgcugggaccuugcauaaccuuucccaucaucgugagggcuuacuggccaucuuuaagucuggaggcauuccugcccuggugaaaaugcuugguucaccaguggauucuguguuguuuuaugccauuacaacucuccacaaccuuuuauuacaucaagaaggagcuaaaauggcagugcguuuagcuggugggcugcagaaaaugguugccuugcucaacaaaacaaauguuaaauucuuggcuauuacgacagacugccuucaaauuuuagcuuauggcaaccaagaaagcaagcucaucauacuggcuagugguggaccccaagcuuuaguaaauauaaugaggaccuauacuuacgaaaaacuacuguggaccacaagcagagugcugaaggugcuaucugucugcucuaguaauaagccggcuauuguagaagcugguggaaugcaagcuuuaggacuucaccugacagauccaagucaacgucuuguucagaacugucuuuggacucucaggaaucuuucagaugcugcaacuaaacaggaagggauggaaggucuccuugggacucuuguucagcuucuggguucagaugauauaaauguggucaccugugcagcuggaauucuuucuaaccucacuugcaauaauuauaagaacaagaugauggucugccaagugggugguauagaggcucuugugcguacuguccuucgggcuggugacagggaagacaucacugagccugccaucugugcucuucgucaucugaccagccgacaccaagaagcagagauggcccagaaugcaguucgccuucacuauggacuaccaguugugguuaagcucuuacacccaccaucccacuggccucugauaaaggcuacuguuggauugauucgaaaucuugcccuuugucccgcaaaucaugcaccuuugcgugagcagggugccauuccacgacuaguucaguugcuuguucgugcacaucaggauacccagcgccguacguccaugggugggacacagcagcaauuuguggaggggguccgcauggaagaaauaguugaagguuguaccggagcccuucacauccuagcucgggauguucacaaccgaauuguuaucagaggacuaaauaccauuccauuguuugugcagcugcuuuauucucccauugaaaacauccaaagaguagcugcagggguccucugugaacuugcucaggacaaggaagcugcagaagcuauugaagcugagggagccacagcuccucugacagaguuacuucacucuaggaaugaagguguggcgacauaugcagcugcuguuuuguuccgaaugucugaggacaagccacaagauuacaagaaacggcuuucaguugagcugaccagcucucucuucagaacagagccaauggcuuggaaugagacugcugaucuuggacuugauauuggugcccagggagaaccccuuggauaucgccaggaugauccuagcuaucguucuuuucacucugguggauauggccaggaugccuuggguauggaccccaugauggaacaugagauggguggccaccacccuggugcugacuauccaguugaugggcugccagaucuggggcaugcccaggaccucauggaugggcugccuccaggugacagcaaucagcuggccugguuugauacugaccuguaaaucauccuuuagguaagaaguuuuaaaaagccaguuuggguaaaauacuuuuacucugccuacagaacuucagaaagacuugguugguagggugggagugguuuaggcuauuuguaaaucugccacaaaaacagguauauacuuugaaaggagaugucuuggaacauuggaauguucucagauuucugguuguuaugugaucauguguggaaguuauuaacuuuaauguuuuuugccacagcuuuugcaacuuaauacucaaaugaguaacauuugcuguuuuaaacauuaauagcagccuuucucucuuuauacagcuguauugucugaacuugcauugugauuggccuguagaguugcugagagggcucgaggggugggcugguaucucagaaagugccugacacacuaaccaagcugaguuuccuaugggaacaauugaaguaaacuuuuuguucugguccuuuuuggucgaggaguaacaauacaaauggauuuugggagugacucaagaagugaagaaugcacaagaauggaucacaagauggaauuuaucaaacccuagccuugcuuguuaaauuuuuuuuuuuuuuuuuuuaagaauaucuguaaugguacugacuuugcuugcuuugaaguagcucuuuuuuuuuuuuuuuuuuuuuuuuugcaguaacuguuuuuuaagucucucguaguguuaaguuauagugaauacugcuacagcaauuucuaauuuuuaagaauugaguaaugguguagaacacuaauucauaaucacucuaauuaauuguaaucugaauaaaguguaacaauuguguagccuuuuuguauaaaauagacaaauagaaaaugguccaauuaguuuccuuuuuaauaugcuuaaaauaagcagguggaucuauuucauguuuuugaucaaaaacuauuugggauauguauggguaggguaaaucaguaagagguguuauuuggaaccuuguuuuggacaguuuaccaguugccuuuuaucccaaaguuguuguaaccugcugugauacgaugcuucaagagaaaaugcgguuauaaaaaaugguucagaauuaaacuuuuaauucauucgauug

SEQ ID NO: 154462 - RNA, 19 nt, Artificial Sequence
  Description of Artificial Sequence: Synthetic oligonucleotide
aggauacagcggcuucugc

SEQ ID NO: 154463 - RNA, 19 nt, Artificial Sequence
  Description of Artificial Sequence: Synthetic oligonucleotide
cgcgacuuauaagagcucc

SEQ ID NO: 154464 - RNA, 19 nt, Artificial Sequence
  Description of Artificial Sequence: Synthetic oligonucleotide
cuugugcggcgccauuuua

SEQ ID NO: 154465 - RNA, 19 nt, Artificial Sequence
  Description of Artificial Sequence: Synthetic oligonucleotide
aagccucucggucuguggc

SEQ ID NO: 154466 - RNA, 19 nt, Artificial Sequence
  Description of Artificial Sequence: Synthetic oligonucleotide
cagcagcguuggcccggcc

SEQ ID NO: 154467 - RNA, 19 nt, Artificial Sequence
  Description of Artificial Sequence: Synthetic oligonucleotide
cccgggagcggagagcgag

SEQ ID NO: 154468 - RNA, 19 nt, Artificial Sequence
  Description of Artificial Sequence: Synthetic oligonucleotide
ggggaggcggagacggagg

SEQ ID NO: 154469 - RNA, 19 nt, Artificial Sequence
  Description of Artificial Sequence: Synthetic oligonucleotide
gaaggucugaggagcagcu

SEQ ID NO: 154470 - RNA, 19 nt, Artificial Sequence
  Description of Artificial Sequence: Synthetic oligonucleotide
uucaguccccgccgagccg

SEQ ID NO: 154471 - RNA, 19 nt, Artificial Sequence
  Description of Artificial Sequence: Synthetic oligonucleotide
gccaccgcaggucgaggac

SEQ ID NO: 154472 - RNA, 19 nt, Artificial Sequence
  Description of Artificial Sequence: Synthetic oligonucleotide
cggucggacucccgcggcg

SEQ ID NO: 154473 - RNA, 19 nt, Artificial Sequence
  Description of Artificial Sequence: Synthetic oligonucleotide
gggaggagccuguuccccu

SEQ ID NO: 154474 - RNA, 19 nt, Artificial Sequence
  Description of Artificial Sequence: Synthetic oligonucleotide
ugaggguauuugaaguaua

SEQ ID NO: 154475 - RNA, 19 nt, Artificial Sequence
  Description of Artificial Sequence: Synthetic oligonucleotide
accauacaacuguuuugaa

SEQ ID NO: 154476 - RNA, 19 nt, Artificial Sequence
  Description of Artificial Sequence: Synthetic oligonucleotide
aaauccagcguggacaaug

SEQ ID NO: 154477 - RNA, 19 nt, Artificial Sequence
  Description of Artificial Sequence: Synthetic oligonucleotide
ggcuacucaagcugauuug

SEQ ID NO: 154478 - RNA, 19 nt, Artificial Sequence
  Description of Artificial Sequence: Synthetic oligonucleotide
gauggaguuggacauggcc

SEQ ID NO: 154479 - RNA, 19 nt, Artificial Sequence
  Description of Artificial Sequence: Synthetic oligonucleotide
cauggaaccagacagaaaa

SEQ ID NO: 154480 - RNA, 19 nt, Artificial Sequence
  Description of Artificial Sequence: Synthetic oligonucleotide
agcggcuguuagucacugg

SEQ ID NO: 154481 - RNA, 19 nt, Artificial Sequence
  Description of Artificial Sequence: Synthetic oligonucleotide
gcagcaacagucuuaccug

SEQ ID NO: 154482 - RNA, 19 nt, Artificial Sequence
  Description of Artificial Sequence: Synthetic oligonucleotide
ggacucuggaauccauucu

SEQ ID NO: 154483 - RNA, 19 nt, Artificial Sequence
  Description of Artificial Sequence: Synthetic oligonucleotide
uggugccacuaccacagcu

SEQ ID NO: 154484 - RNA, 19 nt, Artificial Sequence
  Description of Artificial Sequence: Synthetic oligonucleotide
uccuucucugagugguaaa

SEQ ID NO: 154485 - RNA, 19 nt, Artificial Sequence
  Description of Artificial Sequence: Synthetic oligonucleotide
aggcaauccugaggaagag

SEQ ID NO: 154486 - RNA, 19 nt, Artificial Sequence
  Description of Artificial Sequence: Synthetic oligonucleotide
ggauguggauaccucccaa

SEQ ID NO: 154487 - RNA, 19 nt, Artificial Sequence
  Description of Artificial Sequence: Synthetic oligonucleotide
aguccuguaugagugggaa

SEQ ID NO: 154488 - RNA, 19 nt, Artificial Sequence
  Description of Artificial Sequence: Synthetic oligonucleotide
acagggauuuucucagucc

SEQ ID NO: 154489 - RNA, 19 nt, Artificial Sequence
  Description of Artificial Sequence: Synthetic oligonucleotide
cuucacucaagaacaagua

SEQ ID NO: 154490 - RNA, 19 nt, Artificial Sequence
  Description of Artificial Sequence: Synthetic oligonucleotide
agcugauauugauggacag

SEQ ID NO: 154491 - RNA, 19 nt, Artificial Sequence
  Description of Artificial Sequence: Synthetic oligonucleotide
guaugcaaugacucgagcu

SEQ ID NO: 154492 - RNA, 19 nt, Artificial Sequence
  Description of Artificial Sequence: Synthetic oligonucleotide
ucagaggguacgagcugcu

SEQ ID NO: 154493 - RNA, 19 nt, Artificial Sequence
  Description of Artificial Sequence: Synthetic oligonucleotide
uauguucccugagacauua

SEQ ID NO: 154494 - RNA, 19 nt, Artificial Sequence
  Description of Artificial Sequence: Synthetic oligonucleotide
agaugagggcaugcagauc

SEQ ID NO: 154495 - RNA, 19 nt, Artificial Sequence
  Description of Artificial Sequence: Synthetic oligonucleotide
cccaucuacacaguuugau

SEQ ID NO: 154496 - RNA, 19 nt, Artificial Sequence
  Description of Artificial Sequence: Synthetic oligonucleotide
ugcugcucaucccacuaau

SEQ ID NO: 154497 - RNA, 19 nt, Artificial Sequence
  Description of Artificial Sequence: Synthetic oligonucleotide
uguccagcguuuggcugaa

SEQ ID NO: 154498 - RNA, 19 nt, Artificial Sequence
  Description of Artificial Sequence: Synthetic oligonucleotide
accaucacagaugcugaaa

SEQ ID NO: 154499 - RNA, 19 nt, Artificial Sequence
  Description of Artificial Sequence: Synthetic oligonucleotide
acaugcaguuguaaacuug

SEQ ID NO: 154500 - RNA, 19 nt, Artificial Sequence
  Description of Artificial Sequence: Synthetic oligonucleotide
gauuaacuaucaagaugau

SEQ ID NO: 154501 - RNA, 19 nt, Artificial Sequence
  Description of Artificial Sequence: Synthetic oligonucleotide
ugcagaacuugccacacgu

SEQ ID NO: 154502 - RNA, 19 nt, Artificial Sequence
  Description of Artificial Sequence: Synthetic oligonucleotide
ugcaaucccugaacugaca

SEQ ID NO: 154503 - RNA, 19 nt, Artificial Sequence
  Description of Artificial Sequence: Synthetic oligonucleotide
aaaacugcuaaaugacgag

SEQ ID NO: 154504 - RNA, 19 nt, Artificial Sequence
  Description of Artificial Sequence: Synthetic oligonucleotide
ggaccagguggugguuaau

SEQ ID NO: 154505 - RNA, 19 nt, Artificial Sequence
  Description of Artificial Sequence: Synthetic oligonucleotide
uaaggcugcaguuaugguc

SEQ ID NO: 154506 - RNA, 19 nt, Artificial Sequence
  Description of Artificial Sequence: Synthetic oligonucleotide
ccaucagcuuucuaaaaag

SEQ ID NO: 154507 - RNA, 19 nt, Artificial Sequence
  Description of Artificial Sequence: Synthetic oligonucleotide
ggaagcuuccagacacgcu

SEQ ID NO: 154508 - RNA, 19 nt, Artificial Sequence
  Description of Artificial Sequence: Synthetic oligonucleotide
uaucaugcguucuccucag

SEQ ID NO: 154509 - RNA, 19 nt, Artificial Sequence
  Description of Artificial Sequence: Synthetic oligonucleotide
gauggugucugcuauugua

SEQ ID NO: 154510 - RNA, 19 nt, Artificial Sequence
  Description of Artificial Sequence: Synthetic oligonucleotide
acguaccaugcagaauaca

SEQ ID NO: 154511 - RNA, 19 nt, Artificial Sequence
  Description of Artificial Sequence: Synthetic oligonucleotide
aaaugauguagaaacagcu

SEQ ID NO: 154512 - RNA, 19 nt, Artificial Sequence
  Description of Artificial Sequence: Synthetic oligonucleotide
ucguuguaccgcugggacc

SEQ ID NO: 154513 - RNA, 19 nt, Artificial Sequence
  Description of Artificial Sequence: Synthetic oligonucleotide
cuugcauaaccuuucccau

SEQ ID NO: 154514 - RNA, 19 nt, Artificial Sequence
  Description of Artificial Sequence: Synthetic oligonucleotide
ucaucgugagggcuuacug

SEQ ID NO: 154515 - RNA, 19 nt, Artificial Sequence
  Description of Artificial Sequence: Synthetic oligonucleotide
ggccaucuuuaagucugga

SEQ ID NO: 154516 - RNA, 19 nt, Artificial Sequence
  Description of Artificial Sequence: Synthetic oligonucleotide
aggcauuccugcccuggug

SEQ ID NO: 154517 - RNA, 19 nt, Artificial Sequence
  Description of Artificial Sequence: Synthetic oligonucleotide
gaaaaugcuugguucacca

SEQ ID NO: 154518 - RNA, 19 nt, Artificial Sequence
  Description of Artificial Sequence: Synthetic oligonucleotide
aguggauucuguguuguuu

SEQ ID NO: 154519 - RNA, 19 nt, Artificial Sequence
  Description of Artificial Sequence: Synthetic oligonucleotide
uuaugccauuacaacucuc

SEQ ID NO: 154520 - RNA, 19 nt, Artificial Sequence
  Description of Artificial Sequence: Synthetic oligonucleotide
ccacaaccuuuuauuacau

SEQ ID NO: 154521 - RNA, 19 nt, Artificial Sequence
  Description of Artificial Sequence: Synthetic oligonucleotide
ucaagaaggagcuaaaaug

SEQ ID NO: 154522 - RNA, 19 nt, Artificial Sequence
  Description of Artificial Sequence: Synthetic oligonucleotide
ggcagugcguuuagcuggu

SEQ ID NO: 154523 - RNA, 19 nt, Artificial Sequence
  Description of Artificial Sequence: Synthetic oligonucleotide
ugggcugcagaaaaugguu

SEQ ID NO: 154524 - RNA, 19 nt, Artificial Sequence
  Description of Artificial Sequence: Synthetic oligonucleotide
ugccuugcucaacaaaaca

SEQ ID NO: 154525 - RNA, 19 nt, Artificial Sequence
  Description of Artificial Sequence: Synthetic oligonucleotide
aaauguuaaauucuuggcu

SEQ ID NO: 154526 - RNA, 19 nt, Artificial Sequence
  Description of Artificial Sequence: Synthetic oligonucleotide
uauuacgacagacugccuu

SEQ ID NO: 154527 - RNA, 19 nt, Artificial Sequence
  Description of Artificial Sequence: Synthetic oligonucleotide
ucaaauuuuagcuuauggc

SEQ ID NO: 154528 - RNA, 19 nt, Artificial Sequence
  Description of Artificial Sequence: Synthetic oligonucleotide
caaccaagaaagcaagcuc

SEQ ID NO: 154529 - RNA, 19 nt, Artificial Sequence
  Description of Artificial Sequence: Synthetic oligonucleotide
caucauacuggcuaguggu

SEQ ID NO: 154530 - RNA, 19 nt, Artificial Sequence
  Description of Artificial Sequence: Synthetic oligonucleotide
uggaccccaagcuuuagua

SEQ ID NO: 154531 - RNA, 19 nt, Artificial Sequence
  Description of Artificial Sequence: Synthetic oligonucleotide
aaauauaaugaggaccuau

SEQ ID NO: 154532 - RNA, 19 nt, Artificial Sequence
  Description of Artificial Sequence: Synthetic oligonucleotide
uacuuacgaaaaacuacug

SEQ ID NO: 154533 - RNA, 19 nt, Artificial Sequence
  Description of Artificial Sequence: Synthetic oligonucleotide
guggaccacaagcagagug

SEQ ID NO: 154534 - RNA, 19 nt, Artificial Sequence
  Description of Artificial Sequence: Synthetic oligonucleotide
gcugaaggugcuaucuguc

SEQ ID NO: 154535 - RNA, 19 nt, Artificial Sequence
  Description of Artificial Sequence: Synthetic oligonucleotide
cugcucuaguaauaagccg

SEQ ID NO: 154536 - RNA, 19 nt, Artificial Sequence
  Description of Artificial Sequence: Synthetic oligonucleotide
ggcuauuguagaagcuggu

SEQ ID NO: 154537 - RNA, 19 nt, Artificial Sequence
  Description of Artificial Sequence: Synthetic oligonucleotide
uggaaugcaagcuuuagga

SEQ ID NO: 154538 - RNA, 19 nt, Artificial Sequence
  Description of Artificial Sequence: Synthetic oligonucleotide
acuucaccugacagaucca

SEQ ID NO: 154539 - RNA, 19 nt, Artificial Sequence
  Description of Artificial Sequence: Synthetic oligonucleotide
aagucaacgucuuguucag

SEQ ID NO: 154540 - RNA, 19 nt, Artificial Sequence
  Description of Artificial Sequence: Synthetic oligonucleotide
gaacugucuuuggacucuc

SEQ ID NO: 154541 - RNA, 19 nt, Artificial Sequence
  Description of Artificial Sequence: Synthetic oligonucleotide
caggaaucuuucagaugcu

SEQ ID NO: 154542 - RNA, 19 nt, Artificial Sequence
  Description of Artificial Sequence: Synthetic oligonucleotide
ugcaacuaaacaggaaggg

SEQ ID NO: 154543 - RNA, 19 nt, Artificial Sequence
  Description of Artificial Sequence: Synthetic oligonucleotide
gauggaaggucuccuuggg

SEQ ID NO: 154544 - RNA, 19 nt, Artificial Sequence
  Description of Artificial Sequence: Synthetic oligonucleotide
gacucuuguucagcuucug

SEQ ID NO: 154545 - RNA, 19 nt, Artificial Sequence
  Description of Artificial Sequence: Synthetic oligonucleotide
ggguucagaugauauaaau

SEQ ID NO: 154546 - RNA, 19 nt, Artificial Sequence
  Description of Artificial Sequence: Synthetic oligonucleotide
uguggucaccugugcagcu

SEQ ID NO: 154547 - RNA, 19 nt, Artificial Sequence
  Description of Artificial Sequence: Synthetic oligonucleotide
uggaauucuuucuaaccuc

SEQ ID NO: 154548 - RNA, 19 nt, Artificial Sequence
  Description of Artificial Sequence: Synthetic oligonucleotide
cacuugcaauaauuauaag

SEQ ID NO: 154549 - RNA, 19 nt, Artificial Sequence
  Description of Artificial Sequence: Synthetic oligonucleotide
gaacaagaugauggucugc

SEQ ID NO: 154550 - RNA, 19 nt, Artificial Sequence
  Description of Artificial Sequence: Synthetic oligonucleotide
ccaagugggugguauagag

SEQ ID NO: 154551 - RNA, 19 nt, Artificial Sequence
  Description of Artificial Sequence: Synthetic oligonucleotide
ggcucuugugcguacuguc

SEQ ID NO: 154552 - RNA, 19 nt, Artificial Sequence
  Description of Artificial Sequence: Synthetic oligonucleotide
ccuucgggcuggugacagg

SEQ ID NO: 154553 - RNA, 19 nt, Artificial Sequence
  Description of Artificial Sequence: Synthetic oligonucleotide
ggaagacaucacugagccu

SEQ ID NO: 154554 - RNA, 19 nt, Artificial Sequence
  Description of Artificial Sequence: Synthetic oligonucleotide
ugccaucugugcucuucgu

SEQ ID NO: 154555 - RNA, 19 nt, Artificial Sequence
  Description of Artificial Sequence: Synthetic oligonucleotide
ucaucugaccagccgacac

SEQ ID NO: 154556 - RNA, 19 nt, Artificial Sequence
  Description of Artificial Sequence: Synthetic oligonucleotide
ccaagaagcagagauggcc

SEQ ID NO: 154557 - RNA, 19 nt, Artificial Sequence
  Description of Artificial Sequence: Synthetic oligonucleotide
ccagaaugcaguucgccuu

SEQ ID NO: 154558 - RNA, 19 nt, Artificial Sequence
  Description of Artificial Sequence: Synthetic oligonucleotide
ucacuauggacuaccaguu

SEQ ID NO: 154559 - RNA, 19 nt, Artificial Sequence
  Description of Artificial Sequence: Synthetic oligonucleotide
ugugguuaagcucuuacac

SEQ ID NO: 154560 - RNA, 19 nt, Artificial Sequence
  Description of Artificial Sequence: Synthetic oligonucleotide
cccaccaucccacuggccu

SEQ ID NO: 154561 - RNA, 19 nt, Artificial Sequence
  Description of Artificial Sequence: Synthetic oligonucleotide
ucugauaaaggcuacuguu

SEQ ID NO: 154562 - RNA, 19 nt, Artificial Sequence
  Description of Artificial Sequence: Synthetic oligonucleotide
uggauugauucgaaaucuu

SEQ ID NO: 154563 - RNA, 19 nt, Artificial Sequence
  Description of Artificial Sequence: Synthetic oligonucleotide
ugcccuuugucccgcaaau

SEQ ID NO: 154564 - RNA, 19 nt, Artificial Sequence
  Description of Artificial Sequence: Synthetic oligonucleotide
ucaugcaccuuugcgugag

SEQ ID NO: 154565 - RNA, 19 nt, Artificial Sequence
  Description of Artificial Sequence: Synthetic oligonucleotide
gcagggugccauuccacga

SEQ ID NO: 154566 - RNA, 19 nt, Artificial Sequence
  Description of Artificial Sequence: Synthetic oligonucleotide
acuaguucaguugcuuguu

SEQ ID NO: 154567 - RNA, 19 nt, Artificial Sequence
  Description of Artificial Sequence: Synthetic oligonucleotide
ucgugcacaucaggauacc

SEQ ID NO: 154568 - RNA, 19 nt, Artificial Sequence
  Description of Artificial Sequence: Synthetic oligonucleotide
ccagcgccguacguccaug

SEQ ID NO: 154569 - RNA, 19 nt, Artificial Sequence
  Description of Artificial Sequence: Synthetic oligonucleotide
gggugggacacagcagcaa

SEQ ID NO: 154570 - RNA, 19 nt, Artificial Sequence
  Description of Artificial Sequence: Synthetic oligonucleotide
auuuguggaggggguccgc

SEQ ID NO: 154571 - RNA, 19 nt, Artificial Sequence
  Description of Artificial Sequence: Synthetic oligonucleotide
cauggaagaaauaguugaa

SEQ ID NO: 154572 - RNA, 19 nt, Artificial Sequence
  Description of Artificial Sequence: Synthetic oligonucleotide
agguuguaccggagcccuu

SEQ ID NO: 154573 - RNA, 19 nt, Artificial Sequence
  Description of Artificial Sequence: Synthetic oligonucleotide
ucacauccuagcucgggau

SEQ ID NO: 154574 - RNA, 19 nt, Artificial Sequence
  Description of Artificial Sequence: Synthetic oligonucleotide
uguucacaaccgaauuguu

SEQ ID NO: 154575 - RNA, 19 nt, Artificial Sequence
  Description of Artificial Sequence: Synthetic oligonucleotide
uaucagaggacuaaauacc

SEQ ID NO: 154576 - RNA, 19 nt, Artificial Sequence
  Description of Artificial Sequence: Synthetic oligonucleotide
cauuccauuguuugugcag

SEQ ID NO: 154577 - RNA, 19 nt, Artificial Sequence
  Description of Artificial Sequence: Synthetic oligonucleotide
gcugcuuuauucucccauu

SEQ ID NO: 154578 - RNA, 19 nt, Artificial Sequence
  Description of Artificial Sequence: Synthetic oligonucleotide
ugaaaacauccaaagagua

SEQ ID NO: 154579 - RNA, 19 nt, Artificial Sequence
  Description of Artificial Sequence: Synthetic oligonucleotide
agcugcagggguccucugu

SEQ ID NO: 154580 - RNA, 19 nt, Artificial Sequence
  Description of Artificial Sequence: Synthetic oligonucleotide
ugaacuugcucaggacaag

SEQ ID NO: 154581 - RNA, 19 nt, Artificial Sequence
  Description of Artificial Sequence: Synthetic oligonucleotide
ggaagcugcagaagcuauu

SEQ ID NO: 154582 - RNA, 19 nt, Artificial Sequence
  Description of Artificial Sequence: Synthetic oligonucleotide
ugaagcugagggagccaca

SEQ ID NO: 154583 - RNA, 19 nt, Artificial Sequence
  Description of Artificial Sequence: Synthetic oligonucleotide
agcuccucugacagaguua

SEQ ID NO: 154584 - RNA, 19 nt, Artificial Sequence
  Description of Artificial Sequence: Synthetic oligonucleotide
acuucacucuaggaaugaa

SEQ ID NO: 154585 - RNA, 19 nt, Artificial Sequence
  Description of Artificial Sequence: Synthetic oligonucleotide
agguguggcgacauaugca

SEQ ID NO: 154586 - RNA, 19 nt, Artificial Sequence
  Description of Artificial Sequence: Synthetic oligonucleotide
agcugcuguuuuguuccga

SEQ ID NO: 154587 - RNA, 19 nt, Artificial Sequence
  Description of Artificial Sequence: Synthetic oligonucleotide
aaugucugaggacaagcca

SEQ ID NO: 154588 - RNA, 19 nt, Artificial Sequence
  Description of Artificial Sequence: Synthetic oligonucleotide
acaagauuacaagaaacgg

SEQ ID NO: 154589 - RNA, 19 nt, Artificial Sequence
  Description of Artificial Sequence: Synthetic oligonucleotide
gcuuucaguugagcugacc

SEQ ID NO: 154590 - RNA, 19 nt, Artificial Sequence
  Description of Artificial Sequence: Synthetic oligonucleotide
cagcucucucuucagaaca

SEQ ID NO: 154591 - RNA, 19 nt, Artificial Sequence
  Description of Artificial Sequence: Synthetic oligonucleotide
agagccaauggcuuggaau

SEQ ID NO: 154592 - RNA, 19 nt, Artificial Sequence
  Description of Artificial Sequence: Synthetic oligonucleotide
ugagacugcugaucuugga

SEQ ID NO: 154593 - RNA, 19 nt, Artificial Sequence
  Description of Artificial Sequence: Synthetic oligonucleotide
acuugauauuggugcccag

SEQ ID NO: 154594 - RNA, 19 nt, Artificial Sequence
  Description of Artificial Sequence: Synthetic oligonucleotide
gggagaaccccuuggauau

SEQ ID NO: 154595 - RNA, 19 nt, Artificial Sequence
  Description of Artificial Sequence: Synthetic oligonucleotide
ucgccaggaugauccuagc

SEQ ID NO: 154596 - RNA, 19 nt, Artificial Sequence
  Description of Artificial Sequence: Synthetic oligonucleotide
cuaucguucuuuucacucu

SEQ ID NO: 154597 - RNA, 19 nt, Artificial Sequence
  Description of Artificial Sequence: Synthetic oligonucleotide
ugguggauauggccaggau

SEQ ID NO: 154598 - RNA, 19 nt, Artificial Sequence
  Description of Artificial Sequence: Synthetic oligonucleotide
ugccuuggguauggacccc

SEQ ID NO: 154599 - RNA, 19 nt, Artificial Sequence
  Description of Artificial Sequence: Synthetic oligonucleotide
caugauggaacaugagaug

SEQ ID NO: 154600 - RNA, 19 nt, Artificial Sequence
  Description of Artificial Sequence: Synthetic oligonucleotide
ggguggccaccacccuggu

SEQ ID NO: 154601 - RNA, 19 nt, Artificial Sequence
  Description of Artificial Sequence: Synthetic oligonucleotide
ugcugacuauccaguugau

SEQ ID NO: 154602 - RNA, 19 nt, Artificial Sequence
  Description of Artificial Sequence: Synthetic oligonucleotide
ugggcugccagaucugggg

SEQ ID NO: 154603 - RNA, 19 nt, Artificial Sequence
  Description of Artificial Sequence: Synthetic oligonucleotide
gcaugcccaggaccucaug

SEQ ID NO: 154604 - RNA, 19 nt, Artificial Sequence
  Description of Artificial Sequence: Synthetic oligonucleotide
ggaugggcugccuccaggu

SEQ ID NO: 154605 - RNA, 19 nt, Artificial Sequence
  Description of Artificial Sequence: Synthetic oligonucleotide
ugacagcaaucagcuggcc

SEQ ID NO: 154606 - RNA, 19 nt, Artificial Sequence
  Description of Artificial Sequence: Synthetic oligonucleotide
cugguuugauacugaccug

SEQ ID NO: 154607 - RNA, 19 nt, Artificial Sequence
  Description of Artificial Sequence: Synthetic oligonucleotide
guaaaucauccuuuaggua

SEQ ID NO: 154608 - RNA, 19 nt, Artificial Sequence
  Description of Artificial Sequence: Synthetic oligonucleotide
aagaaguuuuaaaaagcca

SEQ ID NO: 154609 - RNA, 19 nt, Artificial Sequence
  Description of Artificial Sequence: Synthetic oligonucleotide
aguuuggguaaaauacuuu

SEQ ID NO: 154610 - RNA, 19 nt, Artificial Sequence
  Description of Artificial Sequence: Synthetic oligonucleotide
uuacucugccuacagaacu

SEQ ID NO: 154611 - RNA, 19 nt, Artificial Sequence
  Description of Artificial Sequence: Synthetic oligonucleotide
uucagaaagacuugguugg

SEQ ID NO: 154612 - RNA, 19 nt, Artificial Sequence
  Description of Artificial Sequence: Synthetic oligonucleotide
guagggugggagugguuua

SEQ ID NO: 154613 - RNA, 19 nt, Artificial Sequence
  Description of Artificial Sequence: Synthetic oligonucleotide
aggcuauuuguaaaucugc

SEQ ID NO: 154614 - RNA, 19 nt, Artificial Sequence
  Description of Artificial Sequence: Synthetic oligonucleotide
ccacaaaaacagguauaua

SEQ ID NO: 154615 - RNA, 19 nt, Artificial Sequence
  Description of Artificial Sequence: Synthetic oligonucleotide
acuuugaaaggagaugucu

SEQ ID NO: 154616 - RNA, 19 nt, Artificial Sequence
  Description of Artificial Sequence: Synthetic oligonucleotide
uuggaacauuggaauguuc

SEQ ID NO: 154617 - RNA, 19 nt, Artificial Sequence
  Description of Artificial Sequence: Synthetic oligonucleotide
cucagauuucugguuguua

SEQ ID NO: 154618 - RNA, 19 nt, Artificial Sequence
  Description of Artificial Sequence: Synthetic oligonucleotide
augugaucauguguggaag

SEQ ID NO: 154619 - RNA, 19 nt, Artificial Sequence
  Description of Artificial Sequence: Synthetic oligonucleotide
guuauuaacuuuaauguuu

SEQ ID NO: 154620 - RNA, 19 nt, Artificial Sequence
  Description of Artificial Sequence: Synthetic oligonucleotide
uuuugccacagcuuuugca

SEQ ID NO: 154621 - RNA, 19 nt, Artificial Sequence
  Description of Artificial Sequence: Synthetic oligonucleotide
aacuuaauacucaaaugag

SEQ ID NO: 154622 - RNA, 19 nt, Artificial Sequence
  Description of Artificial Sequence: Synthetic oligonucleotide
guaacauuugcuguuuuaa

SEQ ID NO: 154623 - RNA, 19 nt, Artificial Sequence
  Description of Artificial Sequence: Synthetic oligonucleotide
aacauuaauagcagccuuu

SEQ ID NO: 154624 - RNA, 19 nt, Artificial Sequence
  Description of Artificial Sequence: Synthetic oligonucleotide
ucucucuuuauacagcugu

SEQ ID NO: 154625 - RNA, 19 nt, Artificial Sequence
  Description of Artificial Sequence: Synthetic oligonucleotide
uauugucugaacuugcauu

SEQ ID NO: 154626 - RNA, 19 nt, Artificial Sequence
  Description of Artificial Sequence: Synthetic oligonucleotide
ugugauuggccuguagagu

SEQ ID NO: 154627 - RNA, 19 nt, Artificial Sequence
  Description of Artificial Sequence: Synthetic oligonucleotide
uugcugagagggcucgagg

SEQ ID NO: 154628 - RNA, 19 nt, Artificial Sequence
  Description of Artificial Sequence: Synthetic oligonucleotide
gggugggcugguaucucag

SEQ ID NO: 154629 - RNA, 19 nt, Artificial Sequence
  Description of Artificial Sequence: Synthetic oligonucleotide
gaaagugccugacacacua

SEQ ID NO: 154630 - RNA, 19 nt, Artificial Sequence
  Description of Artificial Sequence: Synthetic oligonucleotide
aaccaagcugaguuuccua

SEQ ID NO: 154631 - RNA, 19 nt, Artificial Sequence
  Description of Artificial Sequence: Synthetic oligonucleotide
augggaacaauugaaguaa

SEQ ID NO: 154632 - RNA, 19 nt, Artificial Sequence
  Description of Artificial Sequence: Synthetic oligonucleotide
aacuuuuuguucugguccu

SEQ ID NO: 154633 - RNA, 19 nt, Artificial Sequence
  Description of Artificial Sequence: Synthetic oligonucleotide
uuuuuggucgaggaguaac

SEQ ID NO: 154634 - RNA, 19 nt, Artificial Sequence
  Description of Artificial Sequence: Synthetic oligonucleotide
caauacaaauggauuuugg

SEQ ID NO: 154635 - RNA, 19 nt, Artificial Sequence
  Description of Artificial Sequence: Synthetic oligonucleotide
ggagugacucaagaaguga

SEQ ID NO: 154636 - RNA, 19 nt, Artificial Sequence
  Description of Artificial Sequence: Synthetic oligonucleotide
aagaaugcacaagaaugga

SEQ ID NO: 154637 - RNA, 19 nt, Artificial Sequence
  Description of Artificial Sequence: Synthetic oligonucleotide
aucacaagauggaauuuau

SEQ ID NO: 154638 - RNA, 19 nt, Artificial Sequence
  Description of Artificial Sequence: Synthetic oligonucleotide
ucaaacccuagccuugcuu

SEQ ID NO: 154639 - RNA, 19 nt, Artificial Sequence
  Description of Artificial Sequence: Synthetic oligonucleotide
uuuuuuuuaagaauaucug

SEQ ID NO: 154640 - RNA, 19 nt, Artificial Sequence
  Description of Artificial Sequence: Synthetic oligonucleotide
guaaugguacugacuuugc

SEQ ID NO: 154641 - RNA, 19 nt, Artificial Sequence
  Description of Artificial Sequence: Synthetic oligonucleotide
cuugcuuugaaguagcucu

SEQ ID NO: 154642 - RNA, 19 nt, Artificial Sequence
  Description of Artificial Sequence: Synthetic oligonucleotide
uuuuuuugcaguaacuguu

SEQ ID NO: 154643 - RNA, 19 nt, Artificial Sequence
  Description of Artificial Sequence: Synthetic oligonucleotide
uuuuuaagucucucguagu

SEQ ID NO: 154644 - RNA, 19 nt, Artificial Sequence
  Description of Artificial Sequence: Synthetic oligonucleotide
uguuaaguuauagugaaua

SEQ ID NO: 154645 - RNA, 19 nt, Artificial Sequence
  Description of Artificial Sequence: Synthetic oligonucleotide
acugcuacagcaauuucua

SEQ ID NO: 154646 - RNA, 19 nt, Artificial Sequence
  Description of Artificial Sequence: Synthetic oligonucleotide
aauuuuuaagaauugagua

SEQ ID NO: 154647 - RNA, 19 nt, Artificial Sequence
  Description of Artificial Sequence: Synthetic oligonucleotide
aaugguguagaacacuaau

SEQ ID NO: 154648 - RNA, 19 nt, Artificial Sequence
  Description of Artificial Sequence: Synthetic oligonucleotide
uucauaaucacucuaauua

SEQ ID NO: 154649 - RNA, 19 nt, Artificial Sequence
  Description of Artificial Sequence: Synthetic oligonucleotide
aauuguaaucugaauaaag

SEQ ID NO: 154650 - RNA, 19 nt, Artificial Sequence
  Description of Artificial Sequence: Synthetic oligonucleotide
guguaacaauuguguagcc

SEQ ID NO: 154651 - RNA, 19 nt, Artificial Sequence
  Description of Artificial Sequence: Synthetic oligonucleotide
cuuuuuguauaaaauagac

SEQ ID NO: 154652 - RNA, 19 nt, Artificial Sequence
  Description of Artificial Sequence: Synthetic oligonucleotide
caaauagaaaaugguccaa

SEQ ID NO: 154653 - RNA, 19 nt, Artificial Sequence
  Description of Artificial Sequence: Synthetic oligonucleotide
auuaguuuccuuuuuaaua

SEQ ID NO: 154654 - RNA, 19 nt, Artificial Sequence
  Description of Artificial Sequence: Synthetic oligonucleotide
augcuuaaaauaagcaggu

SEQ ID NO: 154655 - RNA, 19 nt, Artificial Sequence
  Description of Artificial Sequence: Synthetic oligonucleotide
uggaucuauuucauguuuu

SEQ ID NO: 154656 - RNA, 19 nt, Artificial Sequence
  Description of Artificial Sequence: Synthetic oligonucleotide
uugaucaaaaacuauuugg

SEQ ID NO: 154657 - RNA, 19 nt, Artificial Sequence
  Description of Artificial Sequence: Synthetic oligonucleotide
ggauauguauggguagggu

SEQ ID NO: 154658 - RNA, 19 nt, Artificial Sequence
  Description of Artificial Sequence: Synthetic oligonucleotide
uaaaucaguaagagguguu

SEQ ID NO: 154659 - RNA, 19 nt, Artificial Sequence
  Description of Artificial Sequence: Synthetic oligonucleotide
uauuuggaaccuuguuuug

SEQ ID NO: 154660 - RNA, 19 nt, Artificial Sequence
  Description of Artificial Sequence: Synthetic oligonucleotide
ggacaguuuaccaguugcc

SEQ ID NO: 154661 - RNA, 19 nt, Artificial Sequence
  Description of Artificial Sequence: Synthetic oligonucleotide
cuuuuaucccaaaguuguu

SEQ ID NO: 154662 - RNA, 19 nt, Artificial Sequence
  Description of Artificial Sequence: Synthetic oligonucleotide
uguaaccugcugugauacg

SEQ ID NO: 154663 - RNA, 19 nt, Artificial Sequence
  Description of Artificial Sequence: Synthetic oligonucleotide
gaugcuucaagagaaaaug

SEQ ID NO: 154664 - RNA, 19 nt, Artificial Sequence
  Description of Artificial Sequence: Synthetic oligonucleotide
gcgguuauaaaaaaugguu

SEQ ID NO: 154665 - RNA, 19 nt, Artificial Sequence
  Description of Artificial Sequence: Synthetic oligonucleotide
ucagaauuaaacuuuuaau

SEQ ID NO: 154666 - RNA, 19 nt, Artificial Sequence
  Description of Artificial Sequence: Synthetic oligonucleotide
cuuuuaauucauucgauug

SEQ ID NO: 154667 - RNA, 25 nt, Artificial Sequence
  Description of Artificial Sequence: Synthetic oligonucleotide
aggauacagcggcuucugcgcgacu

SEQ ID NO: 154668 - RNA, 25 nt, Artificial Sequence
  Description of Artificial Sequence: Synthetic oligonucleotide
uuauaagagcuccuugugcggcgcc

SEQ ID NO: 154669 - RNA, 25 nt, Artificial Sequence
  Description of Artificial Sequence: Synthetic oligonucleotide
cauuuuaagccucucggucuguggc

SEQ ID NO: 154670 - RNA, 25 nt, Artificial Sequence
  Description of Artificial Sequence: Synthetic oligonucleotide
cagcagcguuggcccggccccggga

SEQ ID NO: 154671 - RNA, 25 nt, Artificial Sequence
  Description of Artificial Sequence: Synthetic oligonucleotide
agcggagagcgaggggaggcggaga

SEQ ID NO: 154672 - RNA, 25 nt, Artificial Sequence
  Description of Artificial Sequence: Synthetic oligonucleotide
acggaggaaggucugaggagcagcu

SEQ ID NO: 154673 - RNA, 25 nt, Artificial Sequence
  Description of Artificial Sequence: Synthetic oligonucleotide
uucaguccccgccgagccgccaccg

SEQ ID NO: 154674 - RNA, 25 nt, Artificial Sequence
  Description of Artificial Sequence: Synthetic oligonucleotide
gcaggucgaggacggucggacuccc

SEQ ID NO: 154675 - RNA, 25 nt, Artificial Sequence
  Description of Artificial Sequence: Synthetic oligonucleotide
cgcggcgggaggagccuguuccccu

SEQ ID NO: 154676 - RNA, 25 nt, Artificial Sequence
  Description of Artificial Sequence: Synthetic oligonucleotide
ugaggguauuugaaguauaccauac

SEQ ID NO: 154677 - RNA, 25 nt, Artificial Sequence
  Description of Artificial Sequence: Synthetic oligonucleotide
caacuguuuugaaaauccagcgugg

SEQ ID NO: 154678 - RNA, 25 nt, Artificial Sequence
  Description of Artificial Sequence: Synthetic oligonucleotide
gacaauggcuacucaagcugauuug

SEQ ID NO: 154679 - RNA, 25 nt, Artificial Sequence
  Description of Artificial Sequence: Synthetic oligonucleotide
gauggaguuggacauggccauggaa

SEQ ID NO: 154680 - RNA, 25 nt, Artificial Sequence
  Description of Artificial Sequence: Synthetic oligonucleotide
accagacagaaaagcggcuguuagu

SEQ ID NO: 154681 - RNA, 25 nt, Artificial Sequence
  Description of Artificial Sequence: Synthetic oligonucleotide
ucacuggcagcaacagucuuaccug

SEQ ID NO: 154682 - RNA, 25 nt, Artificial Sequence
  Description of Artificial Sequence: Synthetic oligonucleotide
ggacucuggaauccauucuggugcc

SEQ ID NO: 154683 - RNA, 25 nt, Artificial Sequence
  Description of Artificial Sequence: Synthetic oligonucleotide
cacuaccacagcuccuucucugagu

SEQ ID NO: 154684 - RNA, 25 nt, Artificial Sequence
  Description of Artificial Sequence: Synthetic oligonucleotide
ugguaaaggcaauccugaggaagag

SEQ ID NO: 154685 - RNA, 25 nt, Artificial Sequence
  Description of Artificial Sequence: Synthetic oligonucleotide
ggauguggauaccucccaaguccug

SEQ ID NO: 154686 - RNA, 25 nt, Artificial Sequence
  Description of Artificial Sequence: Synthetic oligonucleotide
guaugagugggaacagggauuuucu

SEQ ID NO: 154687 - RNA, 25 nt, Artificial Sequence
  Description of Artificial Sequence: Synthetic oligonucleotide
ucaguccuucacucaagaacaagua

SEQ ID NO: 154688 - RNA, 25 nt, Artificial Sequence
  Description of Artificial Sequence: Synthetic oligonucleotide
agcugauauugauggacaguaugca

SEQ ID NO: 154689 - RNA, 25 nt, Artificial Sequence
  Description of Artificial Sequence: Synthetic oligonucleotide
aaugacucgagcucagaggguacga

SEQ ID NO: 154690 - RNA, 25 nt, Artificial Sequence
  Description of Artificial Sequence: Synthetic oligonucleotide
agcugcuauguucccugagacauua

SEQ ID NO: 154691 - RNA, 25 nt, Artificial Sequence
  Description of Artificial Sequence: Synthetic oligonucleotide
agaugagggcaugcagaucccaucu

SEQ ID NO: 154692 - RNA, 25 nt, Artificial Sequence
  Description of Artificial Sequence: Synthetic oligonucleotide
uacacaguuugaugcugcucauccc

SEQ ID NO: 154693 - RNA, 25 nt, Artificial Sequence
  Description of Artificial Sequence: Synthetic oligonucleotide
cacuaauguccagcguuuggcugaa

SEQ ID NO: 154694 - RNA, 25 nt, Artificial Sequence
  Description of Artificial Sequence: Synthetic oligonucleotide
accaucacagaugcugaaacaugca

SEQ ID NO: 154695 - RNA, 25 nt, Artificial Sequence
  Description of Artificial Sequence: Synthetic oligonucleotide
aguuguaaacuugauuaacuaucaa

SEQ ID NO: 154696 - RNA, 25 nt, Artificial Sequence
  Description of Artificial Sequence: Synthetic oligonucleotide
agaugaugcagaacuugccacacgu

SEQ ID NO: 154697 - RNA, 25 nt, Artificial Sequence
  Description of Artificial Sequence: Synthetic oligonucleotide
ugcaaucccugaacugacaaaacug

SEQ ID NO: 154698 - RNA, 25 nt, Artificial Sequence
  Description of Artificial Sequence: Synthetic oligonucleotide
gcuaaaugacgaggaccagguggug

SEQ ID NO: 154699 - RNA, 25 nt, Artificial Sequence
  Description of Artificial Sequence: Synthetic oligonucleotide
gguuaauaaggcugcaguuaugguc

SEQ ID NO: 154700 - RNA, 25 nt, Artificial Sequence
  Description of Artificial Sequence: Synthetic oligonucleotide
ccaucagcuuucuaaaaaggaagcu

SEQ ID NO: 154701 - RNA, 25 nt, Artificial Sequence
  Description of Artificial Sequence: Synthetic oligonucleotide
uuccagacacgcuaucaugcguucu

SEQ ID NO: 154702 - RNA, 25 nt, Artificial Sequence
  Description of Artificial Sequence: Synthetic oligonucleotide
uccucagauggugucugcuauugua

SEQ ID NO: 154703 - RNA, 25 nt, Artificial Sequence
  Description of Artificial Sequence: Synthetic oligonucleotide
acguaccaugcagaauacaaaugau

SEQ ID NO: 154704 - RNA, 25 nt, Artificial Sequence
  Description of Artificial Sequence: Synthetic oligonucleotide
uguagaaacagcucguuguaccgcu

SEQ ID NO: 154705 - RNA, 25 nt, Artificial Sequence
  Description of Artificial Sequence: Synthetic oligonucleotide
ugggaccuugcauaaccuuucccau

SEQ ID NO: 154706 - RNA, 25 nt, Artificial Sequence
  Description of Artificial Sequence: Synthetic oligonucleotide
ucaucgugagggcuuacuggccauc

SEQ ID NO: 154707 - RNA, 25 nt, Artificial Sequence
  Description of Artificial Sequence: Synthetic oligonucleotide
cuuuaagucuggaggcauuccugcc

SEQ ID NO: 154708 - RNA, 25 nt, Artificial Sequence
  Description of Artificial Sequence: Synthetic oligonucleotide
ccuggugaaaaugcuugguucacca

SEQ ID NO: 154709 - RNA, 25 nt, Artificial Sequence
  Description of Artificial Sequence: Synthetic oligonucleotide
aguggauucuguguuguuuuaugcc

SEQ ID NO: 154710 - RNA, 25 nt, Artificial Sequence
  Description of Artificial Sequence: Synthetic oligonucleotide
cauuacaacucuccacaaccuuuua

SEQ ID NO: 154711 - RNA, 25 nt, Artificial Sequence
  Description of Artificial Sequence: Synthetic oligonucleotide
auuacaucaagaaggagcuaaaaug

SEQ ID NO: 154712 - RNA, 25 nt, Artificial Sequence
  Description of Artificial Sequence: Synthetic oligonucleotide
ggcagugcguuuagcuggugggcug

SEQ ID NO: 154713 - RNA, 25 nt, Artificial Sequence
  Description of Artificial Sequence: Synthetic oligonucleotide
gcagaaaaugguugccuugcucaac

SEQ ID NO: 154714 - RNA, 25 nt, Artificial Sequence
  Description of Artificial Sequence: Synthetic oligonucleotide
caaaacaaauguuaaauucuuggcu

SEQ ID NO: 154715 - RNA, 25 nt, Artificial Sequence
  Description of Artificial Sequence: Synthetic oligonucleotide
uauuacgacagacugccuucaaauu

SEQ ID NO: 154716 - RNA, 25 nt, Artificial Sequence
  Description of Artificial Sequence: Synthetic oligonucleotide
uuuagcuuauggcaaccaagaaagc

SEQ ID NO: 154717 - RNA, 25 nt, Artificial Sequence
  Description of Artificial Sequence: Synthetic oligonucleotide
caagcucaucauacuggcuaguggu

SEQ ID NO: 154718 - RNA, 25 nt, Artificial Sequence
  Description of Artificial Sequence: Synthetic oligonucleotide
uggaccccaagcuuuaguaaauaua

SEQ ID NO: 154719 - RNA, 25 nt, Artificial Sequence
  Description of Artificial Sequence: Synthetic oligonucleotide
aaugaggaccuauacuuacgaaaaa

SEQ ID NO: 154720 - RNA, 25 nt, Artificial Sequence
  Description of Artificial Sequence: Synthetic oligonucleotide
acuacuguggaccacaagcagagug

SEQ ID NO: 154721 - RNA, 25 nt, Artificial Sequence
  Description of Artificial Sequence: Synthetic oligonucleotide
gcugaaggugcuaucugucugcucu

SEQ ID NO: 154722 - RNA, 25 nt, Artificial Sequence
  Description of Artificial Sequence: Synthetic oligonucleotide
uaguaauaagccggcuauuguagaa

SEQ ID NO: 154723 - RNA, 25 nt, Artificial Sequence
  Description of Artificial Sequence: Synthetic oligonucleotide
agcugguggaaugcaagcuuuagga

SEQ ID NO: 154724 - RNA, 25 nt, Artificial Sequence
  Description of Artificial Sequence: Synthetic oligonucleotide
acuucaccugacagauccaagucaa

SEQ ID NO: 154725 - RNA, 25 nt, Artificial Sequence
  Description of Artificial Sequence: Synthetic oligonucleotide
acgucuuguucagaacugucuuugg

SEQ ID NO: 154726 - RNA, 25 nt, Artificial Sequence
  Description of Artificial Sequence: Synthetic oligonucleotide
gacucucaggaaucuuucagaugcu

SEQ ID NO: 154727 - RNA, 25 nt, Artificial Sequence
  Description of Artificial Sequence: Synthetic oligonucleotide
ugcaacuaaacaggaagggauggaa

SEQ ID NO: 154728 - RNA, 25 nt, Artificial Sequence
  Description of Artificial Sequence: Synthetic oligonucleotide
aggucuccuugggacucuuguucag

SEQ ID NO: 154729 - RNA, 25 nt, Artificial Sequence
  Description of Artificial Sequence: Synthetic oligonucleotide
gcuucuggguucagaugauauaaau

SEQ ID NO: 154730 - RNA, 25 nt, Artificial Sequence
  Description of Artificial Sequence: Synthetic oligonucleotide
uguggucaccugugcagcuggaauu

SEQ ID NO: 154731 - RNA, 25 nt, Artificial Sequence
  Description of Artificial Sequence: Synthetic oligonucleotide
ucuuucuaaccucacuugcaauaau

SEQ ID NO: 154732 - RNA, 25 nt, Artificial Sequence
  Description of Artificial Sequence: Synthetic oligonucleotide
uuauaagaacaagaugauggucugc

SEQ ID NO: 154733 - RNA, 25 nt, Artificial Sequence
  Description of Artificial Sequence: Synthetic oligonucleotide
ccaagugggugguauagaggcucuu

SEQ ID NO: 154734 - RNA, 25 nt, Artificial Sequence
  Description of Artificial Sequence: Synthetic oligonucleotide
ugugcguacuguccuucgggcuggu

SEQ ID NO: 154735 - RNA, 25 nt, Artificial Sequence
  Description of Artificial Sequence: Synthetic oligonucleotide
ugacagggaagacaucacugagccu

SEQ ID NO: 154736 - RNA, 25 nt, Artificial Sequence
  Description of Artificial Sequence: Synthetic oligonucleotide
ugccaucugugcucuucgucaucug

SEQ ID NO: 154737 - RNA, 25 nt, Artificial Sequence
  Description of Artificial Sequence: Synthetic oligonucleotide
gaccagccgacaccaagaagcagag

SEQ ID NO: 154738 - RNA, 25 nt, Artificial Sequence
  Description of Artificial Sequence: Synthetic oligonucleotide
gauggcccagaaugcaguucgccuu

SEQ ID NO: 154739 - RNA, 25 nt, Artificial Sequence
  Description of Artificial Sequence: Synthetic oligonucleotide
ucacuauggacuaccaguugugguu

SEQ ID NO: 154740 - RNA, 25 nt, Artificial Sequence
  Description of Artificial Sequence: Synthetic oligonucleotide
uaagcucuuacacccaccaucccac

SEQ ID NO: 154741 - RNA, 25 nt, Artificial Sequence
  Description of Artificial Sequence: Synthetic oligonucleotide
cuggccucugauaaaggcuacuguu

SEQ ID NO: 154742 - RNA, 25 nt, Artificial Sequence
  Description of Artificial Sequence: Synthetic oligonucleotide
uggauugauucgaaaucuugcccuu

SEQ ID NO: 154743 - RNA, 25 nt, Artificial Sequence
  Description of Artificial Sequence: Synthetic oligonucleotide
uugucccgcaaaucaugcaccuuug

SEQ ID NO: 154744 - RNA, 25 nt, Artificial Sequence
  Description of Artificial Sequence: Synthetic oligonucleotide
gcgugagcagggugccauuccacga

SEQ ID NO: 154745 - RNA, 25 nt, Artificial Sequence
  Description of Artificial Sequence: Synthetic oligonucleotide
acuaguucaguugcuuguucgugca

SEQ ID NO: 154746 - RNA, 25 nt, Artificial Sequence
  Description of Artificial Sequence: Synthetic oligonucleotide
acaucaggauacccagcgccguacg

SEQ ID NO: 154747 - RNA, 25 nt, Artificial Sequence
  Description of Artificial Sequence: Synthetic oligonucleotide
guccaugggugggacacagcagcaa

SEQ ID NO: 154748 - RNA, 25 nt, Artificial Sequence
  Description of Artificial Sequence: Synthetic oligonucleotide
auuuguggaggggguccgcauggaa

SEQ ID NO: 154749 - RNA, 25 nt, Artificial Sequence
  Description of Artificial Sequence: Synthetic oligonucleotide
agaaauaguugaagguuguaccgga

SEQ ID NO: 154750 - RNA, 25 nt, Artificial Sequence
  Description of Artificial Sequence: Synthetic oligonucleotide
agcccuucacauccuagcucgggau

SEQ ID NO: 154751 - RNA, 25 nt, Artificial Sequence
  Description of Artificial Sequence: Synthetic oligonucleotide
uguucacaaccgaauuguuaucaga

SEQ ID NO: 154752 - RNA, 25 nt, Artificial Sequence
  Description of Artificial Sequence: Synthetic oligonucleotide
aggacuaaauaccauuccauuguuu

SEQ ID NO: 154753 - RNA, 25 nt, Artificial Sequence
  Description of Artificial Sequence: Synthetic oligonucleotide
ugugcagcugcuuuauucucccauu

SEQ ID NO: 154754 - RNA, 25 nt, Artificial Sequence
  Description of Artificial Sequence: Synthetic oligonucleotide
ugaaaacauccaaagaguagcugca

SEQ ID NO: 154755 - RNA, 25 nt, Artificial Sequence
  Description of Artificial Sequence: Synthetic oligonucleotide
agggguccucugugaacuugcucag

SEQ ID NO: 154756 - RNA, 25 nt, Artificial Sequence
  Description of Artificial Sequence: Synthetic oligonucleotide
ggacaaggaagcugcagaagcuauu

SEQ ID NO: 154757 - RNA, 25 nt, Artificial Sequence
  Description of Artificial Sequence: Synthetic oligonucleotide
ugaagcugagggagccacagcuccu

SEQ ID NO: 154758 - RNA, 25 nt, Artificial Sequence
  Description of Artificial Sequence: Synthetic oligonucleotide
ucugacagaguuacuucacucuagg

SEQ ID NO: 154759 - RNA, 25 nt, Artificial Sequence
  Description of Artificial Sequence: Synthetic oligonucleotide
gaaugaagguguggcgacauaugca

SEQ ID NO: 154760 - RNA, 25 nt, Artificial Sequence
  Description of Artificial Sequence: Synthetic oligonucleotide
agcugcuguuuuguuccgaaugucu

SEQ ID NO: 154761 - RNA, 25 nt, Artificial Sequence
  Description of Artificial Sequence: Synthetic oligonucleotide
ugaggacaagccacaagauuacaag

SEQ ID NO: 154762 - RNA, 25 nt, Artificial Sequence
  Description of Artificial Sequence: Synthetic oligonucleotide
gaaacggcuuucaguugagcugacc

SEQ ID NO: 154763 - RNA, 25 nt, Artificial Sequence
  Description of Artificial Sequence: Synthetic oligonucleotide
cagcucucucuucagaacagagcca

SEQ ID NO: 154764 - RNA, 25 nt, Artificial Sequence
  Description of Artificial Sequence: Synthetic oligonucleotide
aauggcuuggaaugagacugcugau

SEQ ID NO: 154765 - RNA, 25 nt, Artificial Sequence
  Description of Artificial Sequence: Synthetic oligonucleotide
ucuuggacuugauauuggugcccag

SEQ ID NO: 154766 - RNA, 25 nt, Artificial Sequence
  Description of Artificial Sequence: Synthetic oligonucleotide
gggagaaccccuuggauaucgccag

SEQ ID NO: 154767 - RNA, 25 nt, Artificial Sequence
  Description of Artificial Sequence: Synthetic oligonucleotide
ggaugauccuagcuaucguucuuuu

SEQ ID NO: 154768 - RNA, 25 nt, Artificial Sequence
  Description of Artificial Sequence: Synthetic oligonucleotide
ucacucugguggauauggccaggau

SEQ ID NO: 154769 - RNA, 25 nt, Artificial Sequence
  Description of Artificial Sequence: Synthetic oligonucleotide
ugccuuggguauggaccccaugaug

SEQ ID NO: 154770 - RNA, 25 nt, Artificial Sequence
  Description of Artificial Sequence: Synthetic oligonucleotide
ggaacaugagauggguggccaccac

SEQ ID NO: 154771 - RNA, 25 nt, Artificial Sequence
  Description of Artificial Sequence: Synthetic oligonucleotide
cccuggugcugacuauccaguugau

SEQ ID NO: 154772 - RNA, 25 nt, Artificial Sequence
  Description of Artificial Sequence: Synthetic oligonucleotide
ugggcugccagaucuggggcaugcc

SEQ ID NO: 154773 - RNA, 25 nt, Artificial Sequence
  Description of Artificial Sequence: Synthetic oligonucleotide
ccaggaccucauggaugggcugccu

SEQ ID NO: 154774 - RNA, 25 nt, Artificial Sequence
  Description of Artificial Sequence: Synthetic oligonucleotide
uccaggugacagcaaucagcuggcc

SEQ ID NO: 154775 - RNA, 25 nt, Artificial Sequence
  Description of Artificial Sequence: Synthetic oligonucleotide
cugguuugauacugaccuguaaauc

SEQ ID NO: 154776 - RNA, 25 nt, Artificial Sequence
  Description of Artificial Sequence: Synthetic oligonucleotide
cauccuuuagguaagaaguuuuaaa

SEQ ID NO: 154777 - RNA, 25 nt, Artificial Sequence
  Description of Artificial Sequence: Synthetic oligonucleotide
aaagccaguuuggguaaaauacuuu

SEQ ID NO: 154778 - RNA, 25 nt, Artificial Sequence
  Description of Artificial Sequence: Synthetic oligonucleotide
uuacucugccuacagaacuucagaa

SEQ ID NO: 154779 - RNA, 25 nt, Artificial Sequence
  Description of Artificial Sequence: Synthetic oligonucleotide
aagacuugguugguagggugggagu

SEQ ID NO: 154780 - RNA, 25 nt, Artificial Sequence
  Description of Artificial Sequence: Synthetic oligonucleotide
ugguuuaggcuauuuguaaaucugc

SEQ ID NO: 154781 - RNA, 25 nt, Artificial Sequence
  Description of Artificial Sequence: Synthetic oligonucleotide
ccacaaaaacagguauauacuuuga

SEQ ID NO: 154782 - RNA, 25 nt, Artificial Sequence
  Description of Artificial Sequence: Synthetic oligonucleotide
aaaggagaugucuuggaacauugga

SEQ ID NO: 154783 - RNA, 25 nt, Artificial Sequence
  Description of Artificial Sequence: Synthetic oligonucleotide
aauguucucagauuucugguuguua

SEQ ID NO: 154784 - RNA, 25 nt, Artificial Sequence
  Description of Artificial Sequence: Synthetic oligonucleotide
augugaucauguguggaaguuauua

SEQ ID NO: 154785 - RNA, 25 nt, Artificial Sequence
  Description of Artificial Sequence: Synthetic oligonucleotide
aacuuuaauguuuuuugccacagcu

SEQ ID NO: 154786 - RNA, 25 nt, Artificial Sequence
  Description of Artificial Sequence: Synthetic oligonucleotide
uuuugcaacuuaauacucaaaugag

SEQ ID NO: 154787 - RNA, 25 nt, Artificial Sequence
  Description of Artificial Sequence: Synthetic oligonucleotide
guaacauuugcuguuuuaaacauua

SEQ ID NO: 154788 - RNA, 25 nt, Artificial Sequence
  Description of Artificial Sequence: Synthetic oligonucleotide
aauagcagccuuucucucuuuauac

SEQ ID NO: 154789 - RNA, 25 nt, Artificial Sequence
  Description of Artificial Sequence: Synthetic oligonucleotide
cagcuguauugucugaacuugcauu

SEQ ID NO: 154790 - RNA, 25 nt, Artificial Sequence
  Description of Artificial Sequence: Synthetic oligonucleotide
ugugauuggccuguagaguugcuga

SEQ ID NO: 154791 - RNA, 25 nt, Artificial Sequence
  Description of Artificial Sequence: Synthetic oligonucleotide
agagggcucgaggggugggcuggua

SEQ ID NO: 154792 - RNA, 25 nt, Artificial Sequence
  Description of Artificial Sequence: Synthetic oligonucleotide
aucucagaaagugccugacacacua

SEQ ID NO: 154793 - RNA, 25 nt, Artificial Sequence
  Description of Artificial Sequence: Synthetic oligonucleotide
aaccaagcugaguuuccuaugggaa

SEQ ID NO: 154794 - RNA, 25 nt, Artificial Sequence
  Description of Artificial Sequence: Synthetic oligonucleotide
acaauugaaguaaacuuuuuguucu

SEQ ID NO: 154795 - RNA, 25 nt, Artificial Sequence
  Description of Artificial Sequence: Synthetic oligonucleotide
ugguccuuuuuggucgaggaguaac

SEQ ID NO: 154796 - RNA, 25 nt, Artificial Sequence
  Description of Artificial Sequence: Synthetic oligonucleotide
caauacaaauggauuuugggaguga

SEQ ID NO: 154797 - RNA, 25 nt, Artificial Sequence
  Description of Artificial Sequence: Synthetic oligonucleotide
acucaagaagugaagaaugcacaag

SEQ ID NO: 154798 - RNA, 25 nt, Artificial Sequence
  Description of Artificial Sequence: Synthetic oligonucleotide
gaauggaucacaagauggaauuuau

SEQ ID NO: 154799 - RNA, 25 nt, Artificial Sequence
  Description of Artificial Sequence: Synthetic oligonucleotide
ucaaacccuagccuugcuuguuaaa

SEQ ID NO: 154800 - RNA, 25 nt, Artificial Sequence
  Description of Artificial Sequence: Synthetic oligonucleotide
auaucuguaaugguacugacuuugc

SEQ ID NO: 154801 - RNA, 25 nt, Artificial Sequence
  Description of Artificial Sequence: Synthetic oligonucleotide
cuugcuuugaaguagcucuuuuuuu

SEQ ID NO: 154802 - RNA, 25 nt, Artificial Sequence
  Description of Artificial Sequence: Synthetic oligonucleotide
aacuguuuuuuaagucucucguagu

SEQ ID NO: 154803 - RNA, 25 nt, Artificial Sequence
  Description of Artificial Sequence: Synthetic oligonucleotide
uguuaaguuauagugaauacugcua

SEQ ID NO: 154804 - RNA, 25 nt, Artificial Sequence
  Description of Artificial Sequence: Synthetic oligonucleotide
acagcaauuucuaauuuuuaagaau

SEQ ID NO: 154805 - RNA, 25 nt, Artificial Sequence
  Description of Artificial Sequence: Synthetic oligonucleotide
uugaguaaugguguagaacacuaau

SEQ ID NO: 154806 - RNA, 25 nt, Artificial Sequence
  Description of Artificial Sequence: Synthetic oligonucleotide
uucauaaucacucuaauuaauugua

SEQ ID NO: 154807 - RNA, 25 nt, Artificial Sequence
  Description of Artificial Sequence: Synthetic oligonucleotide
aaucugaauaaaguguaacaauugu

SEQ ID NO: 154808 - RNA, 25 nt, Artificial Sequence
  Description of Artificial Sequence: Synthetic oligonucleotide
uguagccuuuuuguauaaaauagac

SEQ ID NO: 154809 - RNA, 25 nt, Artificial Sequence
  Description of Artificial Sequence: Synthetic oligonucleotide
caaauagaaaaugguccaauuaguu

SEQ ID NO: 154810 - RNA, 25 nt, Artificial Sequence
  Description of Artificial Sequence: Synthetic oligonucleotide
uuccuuuuuaauaugcuuaaaauaa

SEQ ID NO: 154811 - RNA, 25 nt, Artificial Sequence
  Description of Artificial Sequence: Synthetic oligonucleotide
agcagguggaucuauuucauguuuu

SEQ ID NO: 154812 - RNA, 25 nt, Artificial Sequence
  Description of Artificial Sequence: Synthetic oligonucleotide
uugaucaaaaacuauuugggauaug

SEQ ID NO: 154813 - RNA, 25 nt, Artificial Sequence
  Description of Artificial Sequence: Synthetic oligonucleotide
guauggguaggguaaaucaguaaga

SEQ ID NO: 154814 - RNA, 25 nt, Artificial Sequence
  Description of Artificial Sequence: Synthetic oligonucleotide
agguguuauuuggaaccuuguuuug

SEQ ID NO: 154815 - RNA, 25 nt, Artificial Sequence
  Description of Artificial Sequence: Synthetic oligonucleotide
ggacaguuuaccaguugccuuuuau

SEQ ID NO: 154816 - RNA, 25 nt, Artificial Sequence
  Description of Artificial Sequence: Synthetic oligonucleotide
ucccaaaguuguuguaaccugcugu

SEQ ID NO: 154817 - RNA, 25 nt, Artificial Sequence
  Description of Artificial Sequence: Synthetic oligonucleotide
ugauacgaugcuucaagagaaaaug

SEQ ID NO: 154818 - RNA, 25 nt, Artificial Sequence
  Description of Artificial Sequence: Synthetic oligonucleotide
gcgguuauaaaaaaugguucagaau

SEQ ID NO: 154819 - RNA, 25 nt, Artificial Sequence
  Description of Artificial Sequence: Synthetic oligonucleotide
auuaaacuuuuaauucauucgauug

SEQ ID NO: 154820 - DNA, 21 bp, Artificial Sequence
  Description of Artificial Sequence: Synthetic oligonucleotide
  Description of Combined DNA/RNA Molecule: Synthetic oligonucleotide
cuacacaaaucagcgauuutt

SEQ ID NO: 154821 - DNA, 21 bp, Artificial Sequence
  Description of Artificial Sequence: Synthetic oligonucleotide
  Description of Combined DNA/RNA Molecule: Synthetic oligonucleotide
aaaucgcugauuuguguagtt

SEQ ID NO: 154822 - DNA, 25 bp, Artificial Sequence
  Description of Artificial Sequence: Synthetic oligonucleotide
  Description of Combined DNA/RNA Molecule: Synthetic oligonucleotide
cuacacaaaucagcgauuuccaugt

SEQ ID NO: 154823 - RNA, 27 nt, Artificial Sequence
  Description of Artificial Sequence: Synthetic oligonucleotide
acauggaaaucgcugauuuguguaguc

SEQ ID NO: 154824 - RNA, 13 nt, Artificial Sequence
  Description of Artificial Sequence: Synthetic oligonucleotide
cuacacaaaucag

SEQ ID NO: 154825 - DNA, 11 bp, Artificial Sequence
  Description of Artificial Sequence: Synthetic oligonucleotide
  Description of Combined DNA/RNA Molecule: Synthetic oligonucleotide
gauuuccaugt

SEQ ID NO: 154826 - DNA, 21 bp, Artificial Sequence
  Description of Artificial Sequence: Synthetic oligonucleotide
  Description of Combined DNA/RNA Molecule: Synthetic oligonucleotide
ggaucuuauuucuucggagtt

SEQ ID NO: 154827 - DNA, 21 bp, Artificial Sequence
  Description of Artificial Sequence: Synthetic oligonucleotide
  Description of Combined DNA/RNA Molecule: Synthetic oligonucleotide
cuccgaagaaauaagaucctt

SEQ ID NO: 154828 - RNA, 11 nt, Artificial Sequence
  Description of Artificial Sequence: Synthetic oligonucleotide
ggaucuuauuu

SEQ ID NO: 154829 - DNA, 10 bp, Artificial Sequence
  Description of Artificial Sequence: Synthetic oligonucleotide
  Description of Combined DNA/RNA Molecule: Synthetic oligonucleotide
cuucggagtt

SEQ ID NO: 154830 - RNA, 27 nt, Artificial Sequence
  Description of Artificial Sequence: Synthetic oligonucleotide
cauugucuccgaagaaauaagauccuu

SEQ ID NO: 154831 - RNA, 8 nt, Artificial Sequence
  Description of Artificial Sequence: Synthetic oligonucleotide
  modified_base (2): LNA-G
ggaucuua

SEQ ID NO: 154832 - DNA, 17 bp, Artificial Sequence
  Description of Artificial Sequence: Synthetic oligonucleotide
  Description of Combined DNA/RNA Molecule: Synthetic oligonucleotide
uuucuucggagacaatg

SEQ ID NO: 154833 - DNA, 16 bp, Artificial Sequence
  Description of Artificial Sequence: Synthetic oligonucleotide
  Description of Combined DNA/RNA Molecule: Synthetic oligonucleotide
uucuucggagacaatg

SEQ ID NO: 154834 - DNA, 15 bp, Artificial Sequence
  Description of Artificial Sequence: Synthetic oligonucleotide
  Description of Combined DNA/RNA Molecule: Synthetic oligonucleotide
ucuucggagacaatg

SEQ ID NO: 154835 - DNA, 14 bp, Artificial Sequence
  Description of Artificial Sequence: Synthetic oligonucleotide
  Description of Combined DNA/RNA Molecule: Synthetic oligonucleotide
cuucggagacaatg

SEQ ID NO: 154836 - DNA, 13 bp, Artificial Sequence
  Description of Artificial Sequence: Synthetic oligonucleotide
  Description of Combined DNA/RNA Molecule: Synthetic oligonucleotide
uucggagacaatg

SEQ ID NO: 154837 - DNA, 12 bp, Artificial Sequence
  Description of Artificial Sequence: Synthetic oligonucleotide
  Description of Combined DNA/RNA Molecule: Synthetic oligonucleotide
ucggagacaatg

SEQ ID NO: 154838 - DNA, 11 bp, Artificial Sequence
  Description of Artificial Sequence: Synthetic oligonucleotide
  Description of Combined DNA/RNA Molecule: Synthetic oligonucleotide
cggagacaatg

SEQ ID NO: 154839 - RNA, 9 nt, Artificial Sequence
  Description of Artificial Sequence: Synthetic oligonucleotide
  modified_base (2): LNA-G
ggaucuuau

SEQ ID NO: 154840 - RNA, 10 nt, Artificial Sequence
  Description of Artificial Sequence: Synthetic oligonucleotide
  modified_base (2): LNA-G
ggaucuuauu

SEQ ID NO: 154841 - RNA, 11 nt, Artificial Sequence
  Description of Artificial Sequence: Synthetic oligonucleotide
  modified_base (2): LNA-G
ggaucuuauuu

SEQ ID NO: 154842 - RNA, 12 nt, Artificial Sequence
  Description of Artificial Sequence: Synthetic oligonucleotide
  modified_base (2): LNA-G
ggaucuuauuuc

SEQ ID NO: 154843 - RNA, 8 nt, Artificial Sequence
  Description of Artificial Sequence: Synthetic oligonucleotide
  modified_base (3): LNA-A
cuacacaa

SEQ ID NO: 154844 - DNA, 13 bp, Artificial Sequence
  Description of Artificial Sequence: Synthetic oligonucleotide
  Description of Combined DNA/RNA Molecule: Synthetic oligonucleotide
  modified_base (8): LNA-A
aucagcgauuutt

SEQ ID NO: 154845 - DNA, 12 bp, Artificial Sequence
  Description of Artificial Sequence: Synthetic oligonucleotide
  Description of Combined DNA/RNA Molecule: Synthetic oligonucleotide
  modified_base (7): LNA-A
ucagcgauuutt

SEQ ID NO: 154846 - DNA, 11 bp, Artificial Sequence
  Description of Artificial Sequence: Synthetic oligonucleotide
  Description of Combined DNA/RNA Molecule: Synthetic oligonucleotide
  modified_base (6): LNA-A
cagcgauuutt

SEQ ID NO: 154847 - DNA, 10 bp, Artificial Sequence
  Description of Artificial Sequence: Synthetic oligonucleotide
  Description of Combined DNA/RNA Molecule: Synthetic oligonucleotide
  modified_base (5): LNA-A
agcgauuutt

SEQ ID NO: 154848 - DNA, 9 bp, Artificial Sequence
  Description of Artificial Sequence: Synthetic oligonucleotide
  Description of Combined DNA/RNA Molecule: Synthetic oligonucleotide
  modified_base (4): LNA-A
gcgauuutt

SEQ ID NO: 154849 - DNA, 8 bp, Artificial Sequence
  Description of Artificial Sequence: Synthetic oligonucleotide
  Description of Combined DNA/RNA Molecule: Synthetic oligonucleotide
  modified_base (3): LNA-A
cgauuutt

SEQ ID NO: 154850 - DNA, 7 bp, Artificial Sequence
  Description of Artificial Sequence: Synthetic oligonucleotide
  Description of Combined DNA/RNA Molecule: Synthetic oligonucleotide
  modified_base (2): LNA-A
gauuutt

SEQ ID NO: 154851 - RNA, 9 nt, Artificial Sequence
  Description of Artificial Sequence: Synthetic oligonucleotide
  modified_base (3): LNA-A
cuacacaaa

SEQ ID NO: 154852 - RNA, 10 nt, Artificial Sequence
  Description of Artificial Sequence: Synthetic oligonucleotide
  modified_base (3): LNA-A
cuacacaaau

SEQ ID NO: 154853 - RNA, 11 nt, Artificial Sequence
  Description of Artificial Sequence: Synthetic oligonucleotide
  modified_base (3): LNA-A
cuacacaaauc

SEQ ID NO: 154854 - RNA, 12 nt, Artificial Sequence
  Description of Artificial Sequence: Synthetic oligonucleotide
  modified_base (3): LNA-A
cuacacaaauca

SEQ ID NO: 154855 - RNA, 13 nt, Artificial Sequence
  Description of Artificial Sequence: Synthetic oligonucleotide
  modified_base (3): LNA-A
cuacacaaaucag

SEQ ID NO: 154856 - RNA, 14 nt, Artificial Sequence
  Description of Artificial Sequence: Synthetic oligonucleotide
  modified_base (3): LNA-A
cuacacaaaucagc

SEQ ID NO: 154857 - RNA, 13 nt, Artificial Sequence
  Description of Artificial Sequence: Synthetic oligonucleotide
  modified_base (2): LNA-G
ggaucuuauuucu

SEQ ID NO: 154858 - RNA, 14 nt, Artificial Sequence
  Description of Artificial Sequence: Synthetic oligonucleotide
  modified_base (2): LNA-G
ggaucuuauuucuu

SEQ ID NO: 154859 - RNA, 8 nt, Artificial Sequence
  Description of Artificial Sequence: Synthetic oligonucleotide
  modified_base (2): LNA-G
  modified_base (8): LNA-A
ggaucuua

SEQ ID NO: 154860 - RNA, 9 nt, Artificial Sequence
  Description of Artificial Sequence: Synthetic oligonucleotide
  modified_base (2): LNA-G
  modified_base (9): LNA-U
ggaucuuau

SEQ ID NO: 154861 - RNA, 10 nt, Artificial Sequence
  Description of Artificial Sequence: Synthetic oligonucleotide
  modified_base (2): LNA-G
  modified_base (10): LNA-U
ggaucuuauu

SEQ ID NO: 154862 - RNA, 11 nt, Artificial Sequence
  Description of Artificial Sequence: Synthetic oligonucleotide
  modified_base (2): LNA-G
  modified_base (11): LNA-U
ggaucuuauuu

SEQ ID NO: 154863 - RNA, 12 nt, Artificial Sequence
  Description of Artificial Sequence: Synthetic oligonucleotide
  modified_base (2): LNA-G
  modified_base (12): LNA-C
ggaucuuauuuc

SEQ ID NO: 154864 - RNA, 13 nt, Artificial Sequence
  Description of Artificial Sequence: Synthetic oligonucleotide
  modified_base (2): LNA-G
  modified_base (13): LNA-U
ggaucuuauuucu

SEQ ID NO: 154865 - RNA, 14 nt, Artificial Sequence
  Description of Artificial Sequence: Synthetic oligonucleotide
  modified_base (2): LNA-G
  modified_base (14): LNA-U
ggaucuuauuucuu

SEQ ID NO: 154866 - DNA, 13 bp, Artificial Sequence
  Description of Artificial Sequence: Synthetic oligonucleotide
  Description of Combined DNA/RNA Molecule: Synthetic oligonucleotide
  modified_base (8): LNA-G
uuucuucggagtt

SEQ ID NO: 154867 - DNA, 12 bp, Artificial Sequence
  Description of Artificial Sequence: Synthetic oligonucleotide
  Description of Combined DNA/RNA Molecule: Synthetic oligonucleotide
  modified_base (7): LNA-G
uucuucggagtt

SEQ ID NO: 154868 - DNA, 11 bp, Artificial Sequence
  Description of Artificial Sequence: Synthetic oligonucleotide
  Description of Combined DNA/RNA Molecule: Synthetic oligonucleotide
  modified_base (6): LNA-G
ucuucggagtt

SEQ ID NO: 154869 - DNA, 10 bp, Artificial Sequence
  Description of Artificial Sequence: Synthetic oligonucleotide
  Description of Combined DNA/RNA Molecule: Synthetic oligonucleotide
  modified_base (5): LNA-G
cuucggagtt

SEQ ID NO: 154870 - DNA, 9 bp, Artificial Sequence
  Description of Artificial Sequence: Synthetic oligonucleotide
  Description of Combined DNA/RNA Molecule: Synthetic oligonucleotide
  modified_base (4): LNA-G
uucggagtt

SEQ ID NO: 154871 - DNA, 8 bp, Artificial Sequence
  Description of Artificial Sequence: Synthetic oligonucleotide
  Description of Combined DNA/RNA Molecule: Synthetic oligonucleotide
  modified_base (3): LNA-G
ucggagtt

SEQ ID NO: 154872 - DNA, 7 bp, Artificial Sequence
  Description of Artificial Sequence: Synthetic oligonucleotide
  Description of Combined DNA/RNA Molecule: Synthetic oligonucleotide
  modified_base (2): LNA-G
cggagtt

SEQ ID NO: 154873 - DNA, 13 bp, Artificial Sequence
  Description of Artificial Sequence: Synthetic oligonucleotide
  Description of Combined DNA/RNA Molecule: Synthetic oligonucleotide
  modified_base (1): LNA-U
  modified_base (8): LNA-G
uuucuucggagtt

SEQ ID NO: 154874 - DNA, 12 bp, Artificial Sequence
  Description of Artificial Sequence: Synthetic oligonucleotide
  Description of Combined DNA/RNA Molecule: Synthetic oligonucleotide
  modified_base (1): LNA-U
  modified_base (7): LNA-G
uucuucggagtt

SEQ ID NO: 154875 - DNA, 11 bp, Artificial Sequence
  Description of Artificial Sequence: Synthetic oligonucleotide
  Description of Combined DNA/RNA Molecule: Synthetic oligonucleotide
  modified_base (1): LNA-U
  modified_base (6): LNA-G
ucuucggagtt

SEQ ID NO: 154876 - DNA, 10 bp, Artificial Sequence
  Description of Artificial Sequence: Synthetic oligonucleotide
  Description of Combined DNA/RNA Molecule: Synthetic oligonucleotide
  modified_base (1): LNA-C
  modified_base (5): LNA-G
cuucggagtt

SEQ ID NO: 154877 - DNA, 9 bp, Artificial Sequence
  Description of Artificial Sequence: Synthetic oligonucleotide
  Description of Combined DNA/RNA Molecule: Synthetic oligonucleotide
  modified_base (1): LNA-U
  modified_base (4): LNA-G
uucggagtt

SEQ ID NO: 154878 - DNA, 8 bp, Artificial Sequence
  Description of Artificial Sequence: Synthetic oligonucleotide
  Description of Combined DNA/RNA Molecule: Synthetic oligonucleotide
  modified_base (1): LNA-U
  modified_base (3): LNA-G
ucggagtt

SEQ ID NO: 154879 - DNA, 7 bp, Artificial Sequence
  Description of Artificial Sequence: Synthetic oligonucleotide
  Description of Combined DNA/RNA Molecule: Synthetic oligonucleotide
  modified_base (1): LNA-C
  modified_base (2): LNA-G
cggagtt

SEQ ID NO: 154880 - DNA, 21 bp, Artificial Sequence
  Description of Artificial Sequence: Synthetic oligonucleotide
  Description of Combined DNA/RNA Molecule: Synthetic oligonucleotide
  modified_base (2): LNA-G
  modified_base (16): LNA-G
ggaucuuauuucuucggagtt

SEQ ID NO: 154881 - DNA, 25 bp, Artificial Sequence
  Description of Artificial Sequence: Synthetic oligonucleotide
  Description of Combined DNA/RNA Molecule: Synthetic oligonucleotide
ggaucuuauuucuucggagacaatg

SEQ ID NO: 154882 - RNA, 25 nt, Artificial Sequence
  Description of Artificial Sequence: Synthetic oligonucleotide
guauuuugaugaggaguucacggcc

SEQ ID NO: 154883 - RNA, 25 nt, Artificial Sequence
  Description of Artificial Sequence: Synthetic oligonucleotide
ggcccagaugaucaccaucacacca

SEQ ID NO: 154884 - RNA, 25 nt, Artificial Sequence
  Description of Artificial Sequence: Synthetic oligonucleotide
gggaagaaaacuauccugcggguuu

SEQ ID NO: 154885 - RNA, 25 nt, Artificial Sequence
  Description of Artificial Sequence: Synthetic oligonucleotide
guuuuaauuuauuucauccaguuug

SEQ ID NO: 154886 - RNA, 25 nt, Artificial Sequence
  Description of Artificial Sequence: Synthetic oligonucleotide
acguagggaaauguuaaggacuucu

SEQ ID NO: 154887 - RNA, 25 nt, Artificial Sequence
  Description of Artificial Sequence: Synthetic oligonucleotide
ccaggguuuacccagugggacagag

SEQ ID NO: 154888 - RNA, 25 nt, Artificial Sequence
  Description of Artificial Sequence: Synthetic oligonucleotide
agcaagguuuaaauuuguuauugug

SEQ ID NO: 154889 - RNA, 25 nt, Artificial Sequence
  Description of Artificial Sequence: Synthetic oligonucleotide
uguauuauguuguucaaaugcauuu

SEQ ID NO: 154890 - RNA, 25 nt, Artificial Sequence
  Description of Artificial Sequence: Synthetic oligonucleotide
uuuuaaucuuugugacaggaaagcc

SEQ ID NO: 154891 - RNA, 25 nt, Artificial Sequence
  Description of Artificial Sequence: Synthetic oligonucleotide
uuaaucuuugugacaggaaagcccu

SEQ ID NO: 154892 - RNA, 25 nt, Artificial Sequence
  Description of Artificial Sequence: Synthetic oligonucleotide
gcugcuuaugucucccagcauggcc

SEQ ID NO: 154893 - RNA, 25 nt, Artificial Sequence
  Description of Artificial Sequence: Synthetic oligonucleotide
aaguguuucagaagcuucucccuga

SEQ ID NO: 154894 - RNA, 25 nt, Artificial Sequence
  Description of Artificial Sequence: Synthetic oligonucleotide
gaccaucaauaaggaagaagcccuu

SEQ ID NO: 154895 - RNA, 25 nt, Artificial Sequence
  Description of Artificial Sequence: Synthetic oligonucleotide
ccaucaauaaggaagaagcccuuca

SEQ ID NO: 154896 - RNA, 25 nt, Artificial Sequence
  Description of Artificial Sequence: Synthetic oligonucleotide
ucaauaaggaagaagcccuucagcg

SEQ ID NO: 154897 - RNA, 25 nt, Artificial Sequence
  Description of Artificial Sequence: Synthetic oligonucleotide
aauaaggaagaagcccuucagcggc

SEQ ID NO: 154898 - RNA, 25 nt, Artificial Sequence
  Description of Artificial Sequence: Synthetic oligonucleotide
aggaagaagcccuucagcggccagu

SEQ ID NO: 154899 - RNA, 25 nt, Artificial Sequence
  Description of Artificial Sequence: Synthetic oligonucleotide
gcauaacuaaaggugaaaagcuccg

SEQ ID NO: 154900 - RNA, 25 nt, Artificial Sequence
  Description of Artificial Sequence: Synthetic oligonucleotide
cauaacuaaaggugaaaagcuccgg

SEQ ID NO: 154901 - RNA, 25 nt, Artificial Sequence
  Description of Artificial Sequence: Synthetic oligonucleotide
cuacaucacgccagucaacagucug

SEQ ID NO: 154902 - RNA, 25 nt, Artificial Sequence
  Description of Artificial Sequence: Synthetic oligonucleotide
acuggauuuaagcagaguucaaaag

SEQ ID NO: 154903 - RNA, 25 nt, Artificial Sequence
  Description of Artificial Sequence: Synthetic oligonucleotide
cuggauuuaagcagaguucaaaagc

SEQ ID NO: 154904 - RNA, 25 nt, Artificial Sequence
  Description of Artificial Sequence: Synthetic oligonucleotide
gauuuaagcagaguucaaaagcccu

SEQ ID NO: 154905 - RNA, 25 nt, Artificial Sequence
  Description of Artificial Sequence: Synthetic oligonucleotide
auuuaagcagaguucaaaagcccuu

SEQ ID NO: 154906 - RNA, 25 nt, Artificial Sequence
  Description of Artificial Sequence: Synthetic oligonucleotide
uuaagcagaguucaaaagcccuuca

SEQ ID NO: 154907 - RNA, 25 nt, Artificial Sequence
  Description of Artificial Sequence: Synthetic oligonucleotide
uaagcagaguucaaaagcccuucag

SEQ ID NO: 154908 - RNA, 25 nt, Artificial Sequence
  Description of Artificial Sequence: Synthetic oligonucleotide
agcagaguucaaaagcccuucagcg

SEQ ID NO: 154909 - RNA, 25 nt, Artificial Sequence
  Description of Artificial Sequence: Synthetic oligonucleotide
cucagggucugagugaagccgcucg

SEQ ID NO: 154910 - RNA, 25 nt, Artificial Sequence
  Description of Artificial Sequence: Synthetic oligonucleotide
caagcaacuacaucacgccagucaa

SEQ ID NO: 154911 - RNA, 25 nt, Artificial Sequence
  Description of Artificial Sequence: Synthetic oligonucleotide
aucaauggcagcuucuuggugcgug

SEQ ID NO: 154912 - RNA, 25 nt, Artificial Sequence
  Description of Artificial Sequence: Synthetic oligonucleotide
uuccagcccacauuggauucaucag

SEQ ID NO: 154913 - RNA, 25 nt, Artificial Sequence
  Description of Artificial Sequence: Synthetic oligonucleotide
cagcugagaauguggaauaccuaag

SEQ ID NO: 154914 - RNA, 25 nt, Artificial Sequence
  Description of Artificial Sequence: Synthetic oligonucleotide
aacguaucuccuaauuugaggcuca

SEQ ID NO: 154915 - RNA, 25 nt, Artificial Sequence
  Description of Artificial Sequence: Synthetic oligonucleotide
ccuaaaauaauuucucuacaauugg

SEQ ID NO: 154916 - RNA, 25 nt, Artificial Sequence
  Description of Artificial Sequence: Synthetic oligonucleotide
uggaagauucagcuaguuaggagcc

SEQ ID NO: 154917 - RNA, 25 nt, Artificial Sequence
  Description of Artificial Sequence: Synthetic oligonucleotide
uuaaacucuccuagucaauauccac

SEQ ID NO: 154918 - RNA, 25 nt, Artificial Sequence
  Description of Artificial Sequence: Synthetic oligonucleotide
cagccuacaguuauguucagucaca

SEQ ID NO: 154919 - RNA, 25 nt, Artificial Sequence
  Description of Artificial Sequence: Synthetic oligonucleotide
guuauguucagucacacacacauac

SEQ ID NO: 154920 - RNA, 25 nt, Artificial Sequence
  Description of Artificial Sequence: Synthetic oligonucleotide
cacauacaaaauguuccuuuugcuu

SEQ ID NO: 154921 - RNA, 25 nt, Artificial Sequence
  Description of Artificial Sequence: Synthetic oligonucleotide
uccuuuugcuuuuaaaguaauuuuu

SEQ ID NO: 154922 - RNA, 25 nt, Artificial Sequence
  Description of Artificial Sequence: Synthetic oligonucleotide
ugaccugugaagcaacagucaaugg

SEQ ID NO: 154923 - RNA, 25 nt, Artificial Sequence
  Description of Artificial Sequence: Synthetic oligonucleotide
cuaucucacacaucgacaaaccaau

SEQ ID NO: 154924 - RNA, 25 nt, Artificial Sequence
  Description of Artificial Sequence: Synthetic oligonucleotide
uguccucaauuguacugcuaccacu

SEQ ID NO: 154925 - RNA, 25 nt, Artificial Sequence
  Description of Artificial Sequence: Synthetic oligonucleotide
aaaccguagcuggcaagcggucuua

SEQ ID NO: 154926 - RNA, 25 nt, Artificial Sequence
  Description of Artificial Sequence: Synthetic oligonucleotide
uagcuggcaagcggucuuaccggcu

SEQ ID NO: 154927 - RNA, 25 nt, Artificial Sequence
  Description of Artificial Sequence: Synthetic oligonucleotide
uuguaugguuaaaagauggguuacc

SEQ ID NO: 154928 - RNA, 25 nt, Artificial Sequence
  Description of Artificial Sequence: Synthetic oligonucleotide
ugguuaaaagauggguuaccugcga

SEQ ID NO: 154929 - RNA, 25 nt, Artificial Sequence
  Description of Artificial Sequence: Synthetic oligonucleotide
cagggaauuauacaaucuugcugag

SEQ ID NO: 154930 - RNA, 25 nt, Artificial Sequence
  Description of Artificial Sequence: Synthetic oligonucleotide
acaaucuugcugagcauaaaacagu

SEQ ID NO: 154931 - RNA, 25 nt, Artificial Sequence
  Description of Artificial Sequence: Synthetic oligonucleotide
ccaauaaugaagaguccuuuauccu

SEQ ID NO: 154932 - RNA, 25 nt, Artificial Sequence
  Description of Artificial Sequence: Synthetic oligonucleotide
acuuuggauguuccaacgcaaguug

SEQ ID NO: 154933 - RNA, 25 nt, Artificial Sequence
  Description of Artificial Sequence: Synthetic oligonucleotide
aaugcuuccacuaaacugaaaccau

SEQ ID NO: 154934 - RNA, 25 nt, Artificial Sequence
  Description of Artificial Sequence: Synthetic oligonucleotide
gagaaaguuugacuuuguuaaauau

SEQ ID NO: 154935 - RNA, 25 nt, Artificial Sequence
  Description of Artificial Sequence: Synthetic oligonucleotide
aaagaacuacuguauauuaaaaguu

SEQ ID NO: 154936 - RNA, 25 nt, Artificial Sequence
  Description of Artificial Sequence: Synthetic oligonucleotide
uuagaaauacggguuuugacuuaac

SEQ ID NO: 154937 - RNA, 25 nt, Artificial Sequence
  Description of Artificial Sequence: Synthetic oligonucleotide
aacauggguacagcaaacucagcac

SEQ ID NO: 154938 - RNA, 25 nt, Artificial Sequence
  Description of Artificial Sequence: Synthetic oligonucleotide
aaagacacagaagaugcugaccuca

SEQ ID NO: 154939 - RNA, 25 nt, Artificial Sequence
  Description of Artificial Sequence: Synthetic oligonucleotide
uaguagggagguuuauucagaucgc

SEQ ID NO: 154940 - RNA, 25 nt, Artificial Sequence
  Description of Artificial Sequence: Synthetic oligonucleotide
gccuucugcagcaggguucugggau

SEQ ID NO: 154941 - RNA, 25 nt, Artificial Sequence
  Description of Artificial Sequence: Synthetic oligonucleotide
ggucugguacauauuggaaauuaug

SEQ ID NO: 154942 - RNA, 25 nt, Artificial Sequence
  Description of Artificial Sequence: Synthetic oligonucleotide
cuaguccuuccgauggaagcacuag

SEQ ID NO: 154943 - RNA, 25 nt, Artificial Sequence
  Description of Artificial Sequence: Synthetic oligonucleotide
ccagugaauauuguuuuuaugugga

SEQ ID NO: 154944 - RNA, 25 nt, Artificial Sequence
  Description of Artificial Sequence: Synthetic oligonucleotide
augaauucaaguuggaauugguaga

SEQ ID NO: 154945 - RNA, 25 nt, Artificial Sequence
  Description of Artificial Sequence: Synthetic oligonucleotide
caggacacagauuuagacuuggaga

SEQ ID NO: 154946 - RNA, 25 nt, Artificial Sequence
  Description of Artificial Sequence: Synthetic oligonucleotide
cucaaagcacaguuacaguauucca

SEQ ID NO: 154947 - RNA, 25 nt, Artificial Sequence
  Description of Artificial Sequence: Synthetic oligonucleotide
accacugccaccacugaugaauuaa

SEQ ID NO: 154948 - RNA, 25 nt, Artificial Sequence
  Description of Artificial Sequence: Synthetic oligonucleotide
gaaacuacuagugccacaucaucac

SEQ ID NO: 154949 - RNA, 25 nt, Artificial Sequence
  Description of Artificial Sequence: Synthetic oligonucleotide
aagucggacagccucaccaaacaga

SEQ ID NO: 154950 - RNA, 25 nt, Artificial Sequence
  Description of Artificial Sequence: Synthetic oligonucleotide
gaaagcgaaaaauggaacaugaugg

SEQ ID NO: 154951 - RNA, 25 nt, Artificial Sequence
  Description of Artificial Sequence: Synthetic oligonucleotide
cccucugauuuagcauguagacugc

SEQ ID NO: 154952 - RNA, 25 nt, Artificial Sequence
  Description of Artificial Sequence: Synthetic oligonucleotide
ugagcuauuuaaggaucuauuuaug

SEQ ID NO: 154953 - RNA, 25 nt, Artificial Sequence
  Description of Artificial Sequence: Synthetic oligonucleotide
aaaaggugaaaaagcacuauuauca

SEQ ID NO: 154954 - RNA, 25 nt, Artificial Sequence
  Description of Artificial Sequence: Synthetic oligonucleotide
gaaaaagcacuauuaucaguucugc

SEQ ID NO: 154955 - RNA, 25 nt, Artificial Sequence
  Description of Artificial Sequence: Synthetic oligonucleotide
ggcugaaaagaaagauuaaaccuac

SEQ ID NO: 154956 - RNA, 25 nt, Artificial Sequence
  Description of Artificial Sequence: Synthetic oligonucleotide
uaaacccuuauaauaaaauccuucu

SEQ ID NO: 154957 - RNA, 25 nt, Artificial Sequence
  Description of Artificial Sequence: Synthetic oligonucleotide
cauacuauuagccaaugcuguagac

SEQ ID NO: 154958 - RNA, 25 nt, Artificial Sequence
  Description of Artificial Sequence: Synthetic oligonucleotide
gacagaagcauuuugauaggaauag

SEQ ID NO: 154959 - RNA, 25 nt, Artificial Sequence
  Description of Artificial Sequence: Synthetic oligonucleotide
agagcaaauaagauaauggcccuga

SEQ ID NO: 154960 - RNA, 25 nt, Artificial Sequence
  Description of Artificial Sequence: Synthetic oligonucleotide
ccaacauuuuucucuuccucaagca

SEQ ID NO: 154961 - RNA, 25 nt, Artificial Sequence
  Description of Artificial Sequence: Synthetic oligonucleotide
uuaaguaugagaaaaguucagccca

SEQ ID NO: 154962 - RNA, 25 nt, Artificial Sequence
  Description of Artificial Sequence: Synthetic oligonucleotide
caggaauaaagauggcugcugaacc

SEQ ID NO: 154963 - RNA, 25 nt, Artificial Sequence
  Description of Artificial Sequence: Synthetic oligonucleotide
aauuugaaugaccaaguucucuuca

SEQ ID NO: 154964 - RNA, 25 nt, Artificial Sequence
  Description of Artificial Sequence: Synthetic oligonucleotide
auguauaaagauagccagccuagag

SEQ ID NO: 154965 - RNA, 25 nt, Artificial Sequence
  Description of Artificial Sequence: Synthetic oligonucleotide
ggcuguaacuaucucugugaagugu

SEQ ID NO: 154966 - RNA, 25 nt, Artificial Sequence
  Description of Artificial Sequence: Synthetic oligonucleotide
ucugugaagugugagaaaauuucaa

SEQ ID NO: 154967 - RNA, 25 nt, Artificial Sequence
  Description of Artificial Sequence: Synthetic oligonucleotide
ccuuuaaggaaaugaauccuccuga

SEQ ID NO: 154968 - RNA, 25 nt, Artificial Sequence
  Description of Artificial Sequence: Synthetic oligonucleotide
aaggauacaaaaagugacaucauau

SEQ ID NO: 154969 - RNA, 25 nt, Artificial Sequence
  Description of Artificial Sequence: Synthetic oligonucleotide
agaugcaauuugaaucuucaucaua

SEQ ID NO: 154970 - RNA, 25 nt, Artificial Sequence
  Description of Artificial Sequence: Synthetic oligonucleotide
guucaaaacgaagacuagcuauuaa

SEQ ID NO: 154971 - RNA, 25 nt, Artificial Sequence
  Description of Artificial Sequence: Synthetic oligonucleotide
gugaaaccucaucucuacuaaaaau

SEQ ID NO: 154972 - RNA, 25 nt, Artificial Sequence
  Description of Artificial Sequence: Synthetic oligonucleotide
acgaaagagaagcucuaucucgccu

SEQ ID NO: 154973 - RNA, 25 nt, Artificial Sequence
  Description of Artificial Sequence: Synthetic oligonucleotide
cuccacaagcgccuucgguccaguu

SEQ ID NO: 154974 - RNA, 25 nt, Artificial Sequence
  Description of Artificial Sequence: Synthetic oligonucleotide
gagaagauuccaaagauguagccgc

SEQ ID NO: 154975 - RNA, 25 nt, Artificial Sequence
  Description of Artificial Sequence: Synthetic oligonucleotide
aaucuggauucaaugaggagacuug

SEQ ID NO: 154976 - RNA, 25 nt, Artificial Sequence
  Description of Artificial Sequence: Synthetic oligonucleotide
agaacagauuugagaguagugagga

SEQ ID NO: 154977 - RNA, 25 nt, Artificial Sequence
  Description of Artificial Sequence: Synthetic oligonucleotide
ccagagcugugcagaugaguacaaa

SEQ ID NO: 154978 - RNA, 25 nt, Artificial Sequence
  Description of Artificial Sequence: Synthetic oligonucleotide
ccucagauuguuguuguuaaugggc

SEQ ID NO: 154979 - RNA, 25 nt, Artificial Sequence
  Description of Artificial Sequence: Synthetic oligonucleotide
cuauuuuaauuauuuuuaauuuauu

SEQ ID NO: 154980 - RNA, 25 nt, Artificial Sequence
  Description of Artificial Sequence: Synthetic oligonucleotide
uuuaauuuauuaauauuuaaauaug

SEQ ID NO: 154981 - RNA, 25 nt, Artificial Sequence
  Description of Artificial Sequence: Synthetic oligonucleotide
augcaguuugaauauccuuuguuuc

SEQ ID NO: 154982 - RNA, 25 nt, Artificial Sequence
  Description of Artificial Sequence: Synthetic oligonucleotide
caugcugcuggcgucuaaguguuug

SEQ ID NO: 154983 - RNA, 25 nt, Artificial Sequence
  Description of Artificial Sequence: Synthetic oligonucleotide
agaugugcauuucaccugugacaaa

SEQ ID NO: 154984 - RNA, 25 nt, Artificial Sequence
  Description of Artificial Sequence: Synthetic oligonucleotide
ucaaaaccugugccaggcugaauua

SEQ ID NO: 154985 - RNA, 25 nt, Artificial Sequence
  Description of Artificial Sequence: Synthetic oligonucleotide
gaauguggguagucauucuuacaau

SEQ ID NO: 154986 - RNA, 25 nt, Artificial Sequence
  Description of Artificial Sequence: Synthetic oligonucleotide
auguggguagucauucuuacaauug

SEQ ID NO: 154987 - RNA, 25 nt, Artificial Sequence
  Description of Artificial Sequence: Synthetic oligonucleotide
ugaaaaugagcaucagagaguguac

SEQ ID NO: 154988 - RNA, 25 nt, Artificial Sequence
  Description of Artificial Sequence: Synthetic oligonucleotide
uugcuuuucauguagaacucagcag

SEQ ID NO: 154989 - RNA, 25 nt, Artificial Sequence
  Description of Artificial Sequence: Synthetic oligonucleotide
uguauuucuauauuuauuuucagua

SEQ ID NO: 154990 - RNA, 25 nt, Artificial Sequence
  Description of Artificial Sequence: Synthetic oligonucleotide
uuugauuaauguuucuuaaauggaa

SEQ ID NO: 154991 - RNA, 25 nt, Artificial Sequence
  Description of Artificial Sequence: Synthetic oligonucleotide
caacguguauagugccuaaaauugu

SEQ ID NO: 154992 - RNA, 25 nt, Artificial Sequence
  Description of Artificial Sequence: Synthetic oligonucleotide
cauauccuuggcuacuaacaucugg

SEQ ID NO: 154993 - RNA, 25 nt, Artificial Sequence
  Description of Artificial Sequence: Synthetic oligonucleotide
uacuaacaucuggagacugugagcu

SEQ ID NO: 154994 - RNA, 25 nt, Artificial Sequence
  Description of Artificial Sequence: Synthetic oligonucleotide
cauaaguugugugcuuuuuauuaau

SEQ ID NO: 154995 - RNA, 25 nt, Artificial Sequence
  Description of Artificial Sequence: Synthetic oligonucleotide
gcaucauuuuggcucuucuuacauu

SEQ ID NO: 154996 - RNA, 25 nt, Artificial Sequence
  Description of Artificial Sequence: Synthetic oligonucleotide
gcucuucuuacauuuguaaaaaugu

SEQ ID NO: 154997 - RNA, 25 nt, Artificial Sequence
  Description of Artificial Sequence: Synthetic oligonucleotide
agauuaggucaucuuaauucauauu

SEQ ID NO: 154998 - RNA, 25 nt, Artificial Sequence
  Description of Artificial Sequence: Synthetic oligonucleotide
auggaauugaaagaacuaaucauga

SEQ ID NO: 154999 - RNA, 25 nt, Artificial Sequence
  Description of Artificial Sequence: Synthetic oligonucleotide
cacacucauuccuucugcucuuggg

SEQ ID NO: 155000 - RNA, 25 nt, Artificial Sequence
  Description of Artificial Sequence: Synthetic oligonucleotide
uguagagguaaccaguagcuuugag

SEQ ID NO: 155001 - RNA, 25 nt, Artificial Sequence
  Description of Artificial Sequence: Synthetic oligonucleotide
caaccacaugccacguaauauuuca

SEQ ID NO: 155002 - RNA, 25 nt, Artificial Sequence
  Description of Artificial Sequence: Synthetic oligonucleotide
ucggaaacaaguuauucucuucacu

SEQ ID NO: 155003 - RNA, 25 nt, Artificial Sequence
  Description of Artificial Sequence: Synthetic oligonucleotide
acucccaauaacuaaugcuaagaaa

SEQ ID NO: 155004 - RNA, 25 nt, Artificial Sequence
  Description of Artificial Sequence: Synthetic oligonucleotide
aaugcuaagaaaugcugaaaaucaa

SEQ ID NO: 155005 - RNA, 25 nt, Artificial Sequence
  Description of Artificial Sequence: Synthetic oligonucleotide
gucuuucucuaaauaugauuacuuu

SEQ ID NO: 155006 - RNA, 25 nt, Artificial Sequence
  Description of Artificial Sequence: Synthetic oligonucleotide
ugaauuucaggcauuuuguucuaca

SEQ ID NO: 155007 - RNA, 25 nt, Artificial Sequence
  Description of Artificial Sequence: Synthetic oligonucleotide
cgauucccucucacccgggacucuc

SEQ ID NO: 155008 - RNA, 25 nt, Artificial Sequence
  Description of Artificial Sequence: Synthetic oligonucleotide
aggaaagugaaccuuuaaaguaaag

SEQ ID NO: 155009 - RNA, 25 nt, Artificial Sequence
  Description of Artificial Sequence: Synthetic oligonucleotide
gaggcugcaugcucuggaagccugg

SEQ ID NO: 155010 - RNA, 25 nt, Artificial Sequence
  Description of Artificial Sequence: Synthetic oligonucleotide
ucucugaacagaaaacaaaagagag

SEQ ID NO: 155011 - RNA, 25 nt, Artificial Sequence
  Description of Artificial Sequence: Synthetic oligonucleotide
aacuuggcuguaaucaguuaugccg

SEQ ID NO: 155012 - RNA, 25 nt, Artificial Sequence
  Description of Artificial Sequence: Synthetic oligonucleotide
agaagccaaaauuaaaagaagucca

SEQ ID NO: 155013 - RNA, 25 nt, Artificial Sequence
  Description of Artificial Sequence: Synthetic oligonucleotide
auuaaaagaaguccaggugagguua

SEQ ID NO: 155014 - RNA, 25 nt, Artificial Sequence
  Description of Artificial Sequence: Synthetic oligonucleotide
gaauccggauuaucgggaagaggac

SEQ ID NO: 155015 - RNA, 25 nt, Artificial Sequence
  Description of Artificial Sequence: Synthetic oligonucleotide
aaugugacaucaaagcaaguauugu

SEQ ID NO: 155016 - RNA, 25 nt, Artificial Sequence
  Description of Artificial Sequence: Synthetic oligonucleotide
caucaaagcaaguauuguagcacuc

SEQ ID NO: 155017 - RNA, 25 nt, Artificial Sequence
  Description of Artificial Sequence: Synthetic oligonucleotide
agagagagaaaacaaaaccacaaau

SEQ ID NO: 155018 - RNA, 25 nt, Artificial Sequence
  Description of Artificial Sequence: Synthetic oligonucleotide
ucgcuguaguauuuaagcccauaca

SEQ ID NO: 155019 - RNA, 25 nt, Artificial Sequence
  Description of Artificial Sequence: Synthetic oligonucleotide
cgcuguaguauuuaagcccauacag

SEQ ID NO: 155020 - RNA, 25 nt, Artificial Sequence
  Description of Artificial Sequence: Synthetic oligonucleotide
auuuaagcccauacagaaaccuucc

SEQ ID NO: 155021 - RNA, 25 nt, Artificial Sequence
  Description of Artificial Sequence: Synthetic oligonucleotide
auuaaaauaaacaugguauaccuac

SEQ ID NO: 155022 - RNA, 25 nt, Artificial Sequence
  Description of Artificial Sequence: Synthetic oligonucleotide
cuguucugaucggccaguuuucgga

SEQ ID NO: 155023 - RNA, 25 nt, Artificial Sequence
  Description of Artificial Sequence: Synthetic oligonucleotide
aaauaauuugaacuuuggaacaggg

SEQ ID NO: 155024 - RNA, 25 nt, Artificial Sequence
  Description of Artificial Sequence: Synthetic oligonucleotide
ugcgaccuuaauuuaacuuuccagu

SEQ ID NO: 155025 - RNA, 25 nt, Artificial Sequence
  Description of Artificial Sequence: Synthetic oligonucleotide
cugagaaagcuaaaguuugguuuug

SEQ ID NO: 155026 - RNA, 25 nt, Artificial Sequence
  Description of Artificial Sequence: Synthetic oligonucleotide
aguaaagaugcuacuucccacugua

SEQ ID NO: 155027 - RNA, 25 nt, Artificial Sequence
  Description of Artificial Sequence: Synthetic oligonucleotide
cugcuuaauugcugauaccauauga

SEQ ID NO: 155028 - RNA, 25 nt, Artificial Sequence
  Description of Artificial Sequence: Synthetic oligonucleotide
uaccauaugaaugaaacaugggcug

SEQ ID NO: 155029 - RNA, 25 nt, Artificial Sequence
  Description of Artificial Sequence: Synthetic oligonucleotide
aacuuucuuauccaacuuuuucaua

SEQ ID NO: 155030 - RNA, 25 nt, Artificial Sequence
  Description of Artificial Sequence: Synthetic oligonucleotide
ccuugcaugacaucaugaggccgga

SEQ ID NO: 155031 - RNA, 25 nt, Artificial Sequence
  Description of Artificial Sequence: Synthetic oligonucleotide
ugaauuuguauaugacugcauuugu

SEQ ID NO: 155032 - RNA, 25 nt, Artificial Sequence
  Description of Artificial Sequence: Synthetic oligonucleotide
gaauccuaguagaauguuuacuacc

SEQ ID NO: 155033 - RNA, 25 nt, Artificial Sequence
  Description of Artificial Sequence: Synthetic oligonucleotide
gaaagggaagaauuuuuugaugaaa

SEQ ID NO: 155034 - RNA, 25 nt, Artificial Sequence
  Description of Artificial Sequence: Synthetic oligonucleotide
uaucggcaugccagugugugaauuu

SEQ ID NO: 155035 - RNA, 25 nt, Artificial Sequence
  Description of Artificial Sequence: Synthetic oligonucleotide
caccucauaguagagcaauguaugu

SEQ ID NO: 155036 - RNA, 25 nt, Artificial Sequence
  Description of Artificial Sequence: Synthetic oligonucleotide
ccagaauugccaaagcacauauaua

SEQ ID NO: 155037 - RNA, 25 nt, Artificial Sequence
  Description of Artificial Sequence: Synthetic oligonucleotide
uggugaucuggguaauaguuucucc

SEQ ID NO: 155038 - RNA, 25 nt, Artificial Sequence
  Description of Artificial Sequence: Synthetic oligonucleotide
gaucuggguaauaguuucuccaaau

SEQ ID NO: 155039 - RNA, 25 nt, Artificial Sequence
  Description of Artificial Sequence: Synthetic oligonucleotide
ggaugugaugaauacuuccuagaaa

SEQ ID NO: 155040 - RNA, 25 nt, Artificial Sequence
  Description of Artificial Sequence: Synthetic oligonucleotide
cauuuccacagcuacaccauauaug

SEQ ID NO: 155041 - RNA, 25 nt, Artificial Sequence
  Description of Artificial Sequence: Synthetic oligonucleotide
acagcuacaccauauaugaauggag

SEQ ID NO: 155042 - RNA, 25 nt, Artificial Sequence
  Description of Artificial Sequence: Synthetic oligonucleotide
ugcaguucuuacacgagaagaagau

SEQ ID NO: 155043 - RNA, 25 nt, Artificial Sequence
  Description of Artificial Sequence: Synthetic oligonucleotide
acgagaagaagaucauuuacaggga

SEQ ID NO: 155044 - RNA, 25 nt, Artificial Sequence
  Description of Artificial Sequence: Synthetic oligonucleotide
cgagaagaagaucauuuacagggac

SEQ ID NO: 155045 - RNA, 25 nt, Artificial Sequence
  Description of Artificial Sequence: Synthetic oligonucleotide
aagaagaucauuuacagggaccuga

SEQ ID NO: 155046 - RNA, 25 nt, Artificial Sequence
  Description of Artificial Sequence: Synthetic oligonucleotide
agaggaagagguguuugacugcauc

SEQ ID NO: 155047 - RNA, 25 nt, Artificial Sequence
  Description of Artificial Sequence: Synthetic oligonucleotide
gaggaagagguguuugacugcaucg

SEQ ID NO: 155048 - RNA, 25 nt, Artificial Sequence
  Description of Artificial Sequence: Synthetic oligonucleotide
cuacuuugagggcgaguucacaggg

SEQ ID NO: 155049 - RNA, 25 nt, Artificial Sequence
  Description of Artificial Sequence: Synthetic oligonucleotide
agggcaucuccuggcaccucugucc

SEQ ID NO: 155050 - RNA, 25 nt, Artificial Sequence
  Description of Artificial Sequence: Synthetic oligonucleotide
ggagugauaugguuugucuuuuuaa

SEQ ID NO: 155051 - RNA, 25 nt, Artificial Sequence
  Description of Artificial Sequence: Synthetic oligonucleotide
gagugauaugguuugucuuuuuaag

SEQ ID NO: 155052 - RNA, 25 nt, Artificial Sequence
  Description of Artificial Sequence: Synthetic oligonucleotide
ugcaguaaagauccuaaagguuguc

SEQ ID NO: 155053 - RNA, 25 nt, Artificial Sequence
  Description of Artificial Sequence: Synthetic oligonucleotide
aguaaagauccuaaagguugucgac

SEQ ID NO: 155054 - RNA, 25 nt, Artificial Sequence
  Description of Artificial Sequence: Synthetic oligonucleotide
ugacaaaggacaaccuggcaauugu

SEQ ID NO: 155055 - RNA, 25 nt, Artificial Sequence
  Description of Artificial Sequence: Synthetic oligonucleotide
gcaauugugacccaguggugcgagg

SEQ ID NO: 155056 - RNA, 25 nt, Artificial Sequence
  Description of Artificial Sequence: Synthetic oligonucleotide
aacaucauccauagagacaugaaau

SEQ ID NO: 155057 - RNA, 25 nt, Artificial Sequence
  Description of Artificial Sequence: Synthetic oligonucleotide
ugaaauccaacaauauauuucucca

SEQ ID NO: 155058 - RNA, 25 nt, Artificial Sequence
  Description of Artificial Sequence: Synthetic oligonucleotide
aacaauauauuucuccaugaaggcu

SEQ ID NO: 155059 - RNA, 25 nt, Artificial Sequence
  Description of Artificial Sequence: Synthetic oligonucleotide
aacaguaaagucacgcuggaguggu

SEQ ID NO: 155060 - RNA, 25 nt, Artificial Sequence
  Description of Artificial Sequence: Synthetic oligonucleotide
ugugaagaaaguaaaggaagagagg

SEQ ID NO: 155061 - RNA, 25 nt, Artificial Sequence
  Description of Artificial Sequence: Synthetic oligonucleotide
cuuccgagccauccuugcaucgggc

SEQ ID NO: 155062 - RNA, 25 nt, Artificial Sequence
  Description of Artificial Sequence: Synthetic oligonucleotide
aauggagguugaauauccuacugug

SEQ ID NO: 155063 - RNA, 25 nt, Artificial Sequence
  Description of Artificial Sequence: Synthetic oligonucleotide
ggagguugaauauccuacuguguaa

SEQ ID NO: 155064 - RNA, 25 nt, Artificial Sequence
  Description of Artificial Sequence: Synthetic oligonucleotide
auuuugaguuuucccuuguagugua

SEQ ID NO: 155065 - RNA, 25 nt, Artificial Sequence
  Description of Artificial Sequence: Synthetic oligonucleotide
uauccuguuuguucuuuguugauug

SEQ ID NO: 155066 - RNA, 25 nt, Artificial Sequence
  Description of Artificial Sequence: Synthetic oligonucleotide
ccuguuuguucuuuguugauugaaa

SEQ ID NO: 155067 - RNA, 25 nt, Artificial Sequence
  Description of Artificial Sequence: Synthetic oligonucleotide
cucuacagccuucuuuuucuuccau

SEQ ID NO: 155068 - RNA, 25 nt, Artificial Sequence
  Description of Artificial Sequence: Synthetic oligonucleotide
ucuuccauagcuaaucuuccuucua

SEQ ID NO: 155069 - RNA, 25 nt, Artificial Sequence
  Description of Artificial Sequence: Synthetic oligonucleotide
auaaucuuccuguugaaugcuucau

SEQ ID NO: 155070 - RNA, 25 nt, Artificial Sequence
  Description of Artificial Sequence: Synthetic oligonucleotide
uaaucuuccuguugaaugcuucaug

SEQ ID NO: 155071 - RNA, 25 nt, Artificial Sequence
  Description of Artificial Sequence: Synthetic oligonucleotide
cuucaugacuugaauucuacuuuga

SEQ ID NO: 155072 - RNA, 25 nt, Artificial Sequence
  Description of Artificial Sequence: Synthetic oligonucleotide
aagagggagagaagcaacuacagac

SEQ ID NO: 155073 - RNA, 25 nt, Artificial Sequence
  Description of Artificial Sequence: Synthetic oligonucleotide
cgucuccuaccagaccaaggucaac

SEQ ID NO: 155074 - RNA, 25 nt, Artificial Sequence
  Description of Artificial Sequence: Synthetic oligonucleotide
gaucaaucggcccgacuaucucgac

SEQ ID NO: 155075 - RNA, 25 nt, Artificial Sequence
  Description of Artificial Sequence: Synthetic oligonucleotide
ggacgaacauccaaccuucccaaac

SEQ ID NO: 155076 - RNA, 25 nt, Artificial Sequence
  Description of Artificial Sequence: Synthetic oligonucleotide
agggucggaacccaagcuuagaacu

SEQ ID NO: 155077 - RNA, 25 nt, Artificial Sequence
  Description of Artificial Sequence: Synthetic oligonucleotide
ucggaacccaagcuuagaacuuuaa

SEQ ID NO: 155078 - RNA, 25 nt, Artificial Sequence
  Description of Artificial Sequence: Synthetic oligonucleotide
acccaagcuuagaacuuuaagcaac

SEQ ID NO: 155079 - RNA, 25 nt, Artificial Sequence
  Description of Artificial Sequence: Synthetic oligonucleotide
gaacuuuaagcaacaagaccaccac

SEQ ID NO: 155080 - RNA, 25 nt, Artificial Sequence
  Description of Artificial Sequence: Synthetic oligonucleotide
acuauucaguggcgagaaauaaagu

SEQ ID NO: 155081 - RNA, 25 nt, Artificial Sequence
  Description of Artificial Sequence: Synthetic oligonucleotide
cuauucaguggcgagaaauaaaguu

SEQ ID NO: 155082 - RNA, 25 nt, Artificial Sequence
  Description of Artificial Sequence: Synthetic oligonucleotide
aaacacagauaacaggaaaugaucc

SEQ ID NO: 155083 - RNA, 25 nt, Artificial Sequence
  Description of Artificial Sequence: Synthetic oligonucleotide
cuuaagaaaagagaagaaaugaaac

SEQ ID NO: 155084 - RNA, 25 nt, Artificial Sequence
  Description of Artificial Sequence: Synthetic oligonucleotide
cugaaggaguguguuuccauccucc

SEQ ID NO: 155085 - RNA, 25 nt, Artificial Sequence
  Description of Artificial Sequence: Synthetic oligonucleotide
ucaccgcgggacugaaaaucuuuga

SEQ ID NO: 155086 - RNA, 25 nt, Artificial Sequence
  Description of Artificial Sequence: Synthetic oligonucleotide
agcagaaauaagcgugccguucagg

SEQ ID NO: 155087 - RNA, 25 nt, Artificial Sequence
  Description of Artificial Sequence: Synthetic oligonucleotide
aagcgugccguucaggguccagaag

SEQ ID NO: 155088 - RNA, 25 nt, Artificial Sequence
  Description of Artificial Sequence: Synthetic oligonucleotide
agaaacagucacucaagacugcuug

SEQ ID NO: 155089 - RNA, 25 nt, Artificial Sequence
  Description of Artificial Sequence: Synthetic oligonucleotide
agaggaagaagguccaugucuuugg

SEQ ID NO: 155090 - RNA, 25 nt, Artificial Sequence
  Description of Artificial Sequence: Synthetic oligonucleotide
uguauucaaaauaugccugaaacac

SEQ ID NO: 155091 - RNA, 25 nt, Artificial Sequence
  Description of Artificial Sequence: Synthetic oligonucleotide
auuuuccucccuuucucuguaccuc

SEQ ID NO: 155092 - RNA, 25 nt, Artificial Sequence
  Description of Artificial Sequence: Synthetic oligonucleotide
caaagaaagauagagcaagacaaga

SEQ ID NO: 155093 - RNA, 25 nt, Artificial Sequence
  Description of Artificial Sequence: Synthetic oligonucleotide
aagaaagauagagcaagacaagaaa

SEQ ID NO: 155094 - RNA, 25 nt, Artificial Sequence
  Description of Artificial Sequence: Synthetic oligonucleotide
gaaagcauuuguuuguacaagaucc

SEQ ID NO: 155095 - RNA, 25 nt, Artificial Sequence
  Description of Artificial Sequence: Synthetic oligonucleotide
ugaguuaaacgaacguacuugcaga

SEQ ID NO: 155096 - RNA, 25 nt, Artificial Sequence
  Description of Artificial Sequence: Synthetic oligonucleotide
acugauacagaacgaucgauacaga

SEQ ID NO: 155097 - RNA, 25 nt, Artificial Sequence
  Description of Artificial Sequence: Synthetic oligonucleotide
auauuauauauauauaaaaauaaau

SEQ ID NO: 155098 - RNA, 25 nt, Artificial Sequence
  Description of Artificial Sequence: Synthetic oligonucleotide
auuauauauauauaaaaauaaauau

SEQ ID NO: 155099 - RNA, 25 nt, Artificial Sequence
  Description of Artificial Sequence: Synthetic oligonucleotide
ucacuggauguauuugacugcugug

SEQ ID NO: 155100 - RNA, 25 nt, Artificial Sequence
  Description of Artificial Sequence: Synthetic oligonucleotide
cagggaagaggaggagaugagagac

SEQ ID NO: 155101 - RNA, 25 nt, Artificial Sequence
  Description of Artificial Sequence: Synthetic oligonucleotide
augaucuuuuuuuugucccacuugg

SEQ ID NO: 155102 - RNA, 27 nt, Artificial Sequence
  Description of Artificial Sequence: Synthetic oligonucleotide
ggccgugaacuccucaucaaaauaccu

SEQ ID NO: 155103 - RNA, 27 nt, Artificial Sequence
  Description of Artificial Sequence: Synthetic oligonucleotide
uggugugauggugaucaucugggccgu

SEQ ID NO: 155104 - RNA, 27 nt, Artificial Sequence
  Description of Artificial Sequence: Synthetic oligonucleotide
aaacccgcaggauaguuuucuucccua

SEQ ID NO: 155105 - RNA, 27 nt, Artificial Sequence
  Description of Artificial Sequence: Synthetic oligonucleotide
caaacuggaugaaauaaauuaaaaccc

SEQ ID NO: 155106 - RNA, 27 nt, Artificial Sequence
  Description of Artificial Sequence: Synthetic oligonucleotide
agaaguccuuaacauuucccuacguga

SEQ ID NO: 155107 - RNA, 27 nt, Artificial Sequence
  Description of Artificial Sequence: Synthetic oligonucleotide
cucugucccacuggguaaacccuggcc

SEQ ID NO: 155108 - RNA, 27 nt, Artificial Sequence
  Description of Artificial Sequence: Synthetic oligonucleotide
cacaauaacaaauuuaaaccuugcucc

SEQ ID NO: 155109 - RNA, 27 nt, Artificial Sequence
  Description of Artificial Sequence: Synthetic oligonucleotide
aaaugcauuugaacaacauaauacaca

SEQ ID NO: 155110 - RNA, 27 nt, Artificial Sequence
  Description of Artificial Sequence: Synthetic oligonucleotide
ggcuuuccugucacaaagauuaaaaac

SEQ ID NO: 155111 - RNA, 27 nt, Artificial Sequence
  Description of Artificial Sequence: Synthetic oligonucleotide
agggcuuuccugucacaaagauuaaaa

SEQ ID NO: 155112 - RNA, 27 nt, Artificial Sequence
  Description of Artificial Sequence: Synthetic oligonucleotide
ggccaugcugggagacauaagcagcag

SEQ ID NO: 155113 - RNA, 27 nt, Artificial Sequence
  Description of Artificial Sequence: Synthetic oligonucleotide
ucagggagaagcuucugaaacacuucu

SEQ ID NO: 155114 - RNA, 27 nt, Artificial Sequence
  Description of Artificial Sequence: Synthetic oligonucleotide
aagggcuucuuccuuauugauggucag

SEQ ID NO: 155115 - RNA, 27 nt, Artificial Sequence
  Description of Artificial Sequence: Synthetic oligonucleotide
ugaagggcuucuuccuuauugaugguc

SEQ ID NO: 155116 - RNA, 27 nt, Artificial Sequence
  Description of Artificial Sequence: Synthetic oligonucleotide
cgcugaagggcuucuuccuuauugaug

SEQ ID NO: 155117 - RNA, 27 nt, Artificial Sequence
  Description of Artificial Sequence: Synthetic oligonucleotide
gccgcugaagggcuucuuccuuauuga

SEQ ID NO: 155118 - RNA, 27 nt, Artificial Sequence
  Description of Artificial Sequence: Synthetic oligonucleotide
acuggccgcugaagggcuucuuccuua

SEQ ID NO: 155119 - RNA, 27 nt, Artificial Sequence
  Description of Artificial Sequence: Synthetic oligonucleotide
cggagcuuuucaccuuuaguuaugcuu

SEQ ID NO: 155120 - RNA, 27 nt, Artificial Sequence
  Description of Artificial Sequence: Synthetic oligonucleotide
ccggagcuuuucaccuuuaguuaugcu

SEQ ID NO: 155121 - RNA, 27 nt, Artificial Sequence
  Description of Artificial Sequence: Synthetic oligonucleotide
cagacuguugacuggcgugauguaguu

SEQ ID NO: 155122 - RNA, 27 nt, Artificial Sequence
  Description of Artificial Sequence: Synthetic oligonucleotide
cuuuugaacucugcuuaaauccagugg

SEQ ID NO: 155123 - RNA, 27 nt, Artificial Sequence
  Description of Artificial Sequence: Synthetic oligonucleotide
gcuuuugaacucugcuuaaauccagug

SEQ ID NO: 155124 - RNA, 27 nt, Artificial Sequence
  Description of Artificial Sequence: Synthetic oligonucleotide
agggcuuuugaacucugcuuaaaucca

SEQ ID NO: 155125 - RNA, 27 nt, Artificial Sequence
  Description of Artificial Sequence: Synthetic oligonucleotide
aagggcuuuugaacucugcuuaaaucc

SEQ ID NO: 155126 - RNA, 27 nt, Artificial Sequence
  Description of Artificial Sequence: Synthetic oligonucleotide
ugaagggcuuuugaacucugcuuaaau

SEQ ID NO: 155127 - RNA, 27 nt, Artificial Sequence
  Description of Artificial Sequence: Synthetic oligonucleotide
cugaagggcuuuugaacucugcuuaaa

SEQ ID NO: 155128 - RNA, 27 nt, Artificial Sequence
  Description of Artificial Sequence: Synthetic oligonucleotide
cgcugaagggcuuuugaacucugcuua

SEQ ID NO: 155129 - RNA, 27 nt, Artificial Sequence
  Description of Artificial Sequence: Synthetic oligonucleotide
cgagcggcuucacucagacccugaggc

SEQ ID NO: 155130 - RNA, 27 nt, Artificial Sequence
  Description of Artificial Sequence: Synthetic oligonucleotide
uugacuggcgugauguaguugcuuggg

SEQ ID NO: 155131 - RNA, 27 nt, Artificial Sequence
  Description of Artificial Sequence: Synthetic oligonucleotide
cacgcaccaagaagcugccauugaucc

SEQ ID NO: 155132 - RNA, 27 nt, Artificial Sequence
  Description of Artificial Sequence: Synthetic oligonucleotide
cugaugaauccaaugugggcuggaauc

SEQ ID NO: 155133 - RNA, 27 nt, Artificial Sequence
  Description of Artificial Sequence: Synthetic oligonucleotide
cuuagguauuccacauucucagcugug

SEQ ID NO: 155134 - RNA, 27 nt, Artificial Sequence
  Description of Artificial Sequence: Synthetic oligonucleotide
ugagccucaaauuaggagauacguuuu

SEQ ID NO: 155135 - RNA, 27 nt, Artificial Sequence
  Description of Artificial Sequence: Synthetic oligonucleotide
ccaauuguagagaaauuauuuuaggaa

SEQ ID NO: 155136 - RNA, 27 nt, Artificial Sequence
  Description of Artificial Sequence: Synthetic oligonucleotide
ggcuccuaacuagcugaaucuuccaau

SEQ ID NO: 155137 - RNA, 27 nt, Artificial Sequence
  Description of Artificial Sequence: Synthetic oligonucleotide
guggauauugacuaggagaguuuaaaa

SEQ ID NO: 155138 - RNA, 27 nt, Artificial Sequence
  Description of Artificial Sequence: Synthetic oligonucleotide
ugugacugaacauaacuguaggcugaa

SEQ ID NO: 155139 - RNA, 27 nt, Artificial Sequence
  Description of Artificial Sequence: Synthetic oligonucleotide
guaugugugugugacugaacauaacug

SEQ ID NO: 155140 - RNA, 27 nt, Artificial Sequence
  Description of Artificial Sequence: Synthetic oligonucleotide
aagcaaaaggaacauuuuguaugugug

SEQ ID NO: 155141 - RNA, 27 nt, Artificial Sequence
  Description of Artificial Sequence: Synthetic oligonucleotide
aaaaauuacuuuaaaagcaaaaggaac

SEQ ID NO: 155142 - RNA, 27 nt, Artificial Sequence
  Description of Artificial Sequence: Synthetic oligonucleotide
ccauugacuguugcuucacaggucaga

SEQ ID NO: 155143 - RNA, 27 nt, Artificial Sequence
  Description of Artificial Sequence: Synthetic oligonucleotide
auugguuugucgaugugugagauaguu

SEQ ID NO: 155144 - RNA, 27 nt, Artificial Sequence
  Description of Artificial Sequence: Synthetic oligonucleotide
agugguagcaguacaauugaggacaag

SEQ ID NO: 155145 - RNA, 27 nt, Artificial Sequence
  Description of Artificial Sequence: Synthetic oligonucleotide
uaagaccgcuugccagcuacgguuuca

SEQ ID NO: 155146 - RNA, 27 nt, Artificial Sequence
  Description of Artificial Sequence: Synthetic oligonucleotide
agccgguaagaccgcuugccagcuacg

SEQ ID NO: 155147 - RNA, 27 nt, Artificial Sequence
  Description of Artificial Sequence: Synthetic oligonucleotide
gguaacccaucuuuuaaccauacaacu

SEQ ID NO: 155148 - RNA, 27 nt, Artificial Sequence
  Description of Artificial Sequence: Synthetic oligonucleotide
ucgcagguaacccaucuuuuaaccaua

SEQ ID NO: 155149 - RNA, 27 nt, Artificial Sequence
  Description of Artificial Sequence: Synthetic oligonucleotide
cucagcaagauuguauaauucccugca

SEQ ID NO: 155150 - RNA, 27 nt, Artificial Sequence
  Description of Artificial Sequence: Synthetic oligonucleotide
acuguuuuaugcucagcaagauuguau

SEQ ID NO: 155151 - RNA, 27 nt, Artificial Sequence
  Description of Artificial Sequence: Synthetic oligonucleotide
aggauaaaggacucuucauuauuggaa

SEQ ID NO: 155152 - RNA, 27 nt, Artificial Sequence
  Description of Artificial Sequence: Synthetic oligonucleotide
caacuugcguuggaacauccaaagugu

SEQ ID NO: 155153 - RNA, 27 nt, Artificial Sequence
  Description of Artificial Sequence: Synthetic oligonucleotide
augguuucaguuuaguggaagcauuua

SEQ ID NO: 155154 - RNA, 27 nt, Artificial Sequence
  Description of Artificial Sequence: Synthetic oligonucleotide
auauuuaacaaagucaaacuuucucac

SEQ ID NO: 155155 - RNA, 27 nt, Artificial Sequence
  Description of Artificial Sequence: Synthetic oligonucleotide
aacuuuuaauauacaguaguucuuuuc

SEQ ID NO: 155156 - RNA, 27 nt, Artificial Sequence
  Description of Artificial Sequence: Synthetic oligonucleotide
guuaagucaaaacccguauuucuaaag

SEQ ID NO: 155157 - RNA, 27 nt, Artificial Sequence
  Description of Artificial Sequence: Synthetic oligonucleotide
gugcugaguuugcuguacccauguuga

SEQ ID NO: 155158 - RNA, 27 nt, Artificial Sequence
  Description of Artificial Sequence: Synthetic oligonucleotide
ugaggucagcaucuucugugucuuuac

SEQ ID NO: 155159 - RNA, 27 nt, Artificial Sequence
  Description of Artificial Sequence: Synthetic oligonucleotide
gcgaucugaauaaaccucccuacuagc

SEQ ID NO: 155160 - RNA, 27 nt, Artificial Sequence
  Description of Artificial Sequence: Synthetic oligonucleotide
aucccagaacccugcugcagaaggcca

SEQ ID NO: 155161 - RNA, 27 nt, Artificial Sequence
  Description of Artificial Sequence: Synthetic oligonucleotide
cauaauuuccaauauguaccagaccuu

SEQ ID NO: 155162 - RNA, 27 nt, Artificial Sequence
  Description of Artificial Sequence: Synthetic oligonucleotide
cuagugcuuccaucggaaggacuaggu

SEQ ID NO: 155163 - RNA, 27 nt, Artificial Sequence
  Description of Artificial Sequence: Synthetic oligonucleotide
uccacauaaaaacaauauucacuggga

SEQ ID NO: 155164 - RNA, 27 nt, Artificial Sequence
  Description of Artificial Sequence: Synthetic oligonucleotide
ucuaccaauuccaacuugaauucauug

SEQ ID NO: 155165 - RNA, 27 nt, Artificial Sequence
  Description of Artificial Sequence: Synthetic oligonucleotide
ucuccaagucuaaaucuguguccugag

SEQ ID NO: 155166 - RNA, 27 nt, Artificial Sequence
  Description of Artificial Sequence: Synthetic oligonucleotide
uggaauacuguaacugugcuuugagga

SEQ ID NO: 155167 - RNA, 27 nt, Artificial Sequence
  Description of Artificial Sequence: Synthetic oligonucleotide
uuaauucaucagugguggcagugguag

SEQ ID NO: 155168 - RNA, 27 nt, Artificial Sequence
  Description of Artificial Sequence: Synthetic oligonucleotide
gugaugauguggcacuaguaguuucuu

SEQ ID NO: 155169 - RNA, 27 nt, Artificial Sequence
  Description of Artificial Sequence: Synthetic oligonucleotide
ucuguuuggugaggcuguccgacuuug

SEQ ID NO: 155170 - RNA, 27 nt, Artificial Sequence
  Description of Artificial Sequence: Synthetic oligonucleotide
ccaucauguuccauuuuucgcuuucuc

SEQ ID NO: 155171 - RNA, 27 nt, Artificial Sequence
  Description of Artificial Sequence: Synthetic oligonucleotide
gcagucuacaugcuaaaucagagggua

SEQ ID NO: 155172 - RNA, 27 nt, Artificial Sequence
  Description of Artificial Sequence: Synthetic oligonucleotide
cauaaauagauccuuaaauagcucaaa

SEQ ID NO: 155173 - RNA, 27 nt, Artificial Sequence
  Description of Artificial Sequence: Synthetic oligonucleotide
ugauaauagugcuuuuucaccuuuuuc

SEQ ID NO: 155174 - RNA, 27 nt, Artificial Sequence
  Description of Artificial Sequence: Synthetic oligonucleotide
gcagaacugauaauagugcuuuuucac

SEQ ID NO: 155175 - RNA, 27 nt, Artificial Sequence
  Description of Artificial Sequence: Synthetic oligonucleotide
guagguuuaaucuuucuuuucagccau

SEQ ID NO: 155176 - RNA, 27 nt, Artificial Sequence
  Description of Artificial Sequence: Synthetic oligonucleotide
agaaggauuuuauuauaaggguuuaau

SEQ ID NO: 155177 - RNA, 27 nt, Artificial Sequence
  Description of Artificial Sequence: Synthetic oligonucleotide
gucuacagcauuggcuaauaguaugaa

SEQ ID NO: 155178 - RNA, 27 nt, Artificial Sequence
  Description of Artificial Sequence: Synthetic oligonucleotide
cuauuccuaucaaaaugcuucugucua

SEQ ID NO: 155179 - RNA, 27 nt, Artificial Sequence
  Description of Artificial Sequence: Synthetic oligonucleotide
ucagggccauuaucuuauuugcucuau

SEQ ID NO: 155180 - RNA, 27 nt, Artificial Sequence
  Description of Artificial Sequence: Synthetic oligonucleotide
ugcuugaggaagagaaaaauguugguc

SEQ ID NO: 155181 - RNA, 27 nt, Artificial Sequence
  Description of Artificial Sequence: Synthetic oligonucleotide
ugggcugaacuuuucucauacuuaaag

SEQ ID NO: 155182 - RNA, 27 nt, Artificial Sequence
  Description of Artificial Sequence: Synthetic oligonucleotide
gguucagcagccaucuuuauuccugcg

SEQ ID NO: 155183 - RNA, 27 nt, Artificial Sequence
  Description of Artificial Sequence: Synthetic oligonucleotide
ugaagagaacuuggucauucaaauuuc

SEQ ID NO: 155184 - RNA, 27 nt, Artificial Sequence
  Description of Artificial Sequence: Synthetic oligonucleotide
cucuaggcuggcuaucuuuauacauac

SEQ ID NO: 155185 - RNA, 27 nt, Artificial Sequence
  Description of Artificial Sequence: Synthetic oligonucleotide
acacuucacagagauaguuacagccau

SEQ ID NO: 155186 - RNA, 27 nt, Artificial Sequence
  Description of Artificial Sequence: Synthetic oligonucleotide
uugaaauuuucucacacuucacagaga

SEQ ID NO: 155187 - RNA, 27 nt, Artificial Sequence
  Description of Artificial Sequence: Synthetic oligonucleotide
ucaggaggauucauuuccuuaaaggaa

SEQ ID NO: 155188 - RNA, 27 nt, Artificial Sequence
  Description of Artificial Sequence: Synthetic oligonucleotide
auaugaugucacuuuuuguauccuuga

SEQ ID NO: 155189 - RNA, 27 nt, Artificial Sequence
  Description of Artificial Sequence: Synthetic oligonucleotide
uaugaugaagauucaaauugcaucuua

SEQ ID NO: 155190 - RNA, 27 nt, Artificial Sequence
  Description of Artificial Sequence: Synthetic oligonucleotide
uuaauagcuagucuucguuuugaacag

SEQ ID NO: 155191 - RNA, 27 nt, Artificial Sequence
  Description of Artificial Sequence: Synthetic oligonucleotide
auuuuuaguagagaugagguuucacca

SEQ ID NO: 155192 - RNA, 27 nt, Artificial Sequence
  Description of Artificial Sequence: Synthetic oligonucleotide
aggcgagauagagcuucucuuucguuc

SEQ ID NO: 155193 - RNA, 27 nt, Artificial Sequence
  Description of Artificial Sequence: Synthetic oligonucleotide
aacuggaccgaaggcgcuuguggagaa

SEQ ID NO: 155194 - RNA, 27 nt, Artificial Sequence
  Description of Artificial Sequence: Synthetic oligonucleotide
gcggcuacaucuuuggaaucuucuccu

SEQ ID NO: 155195 - RNA, 27 nt, Artificial Sequence
  Description of Artificial Sequence: Synthetic oligonucleotide
caagucuccucauugaauccagauugg

SEQ ID NO: 155196 - RNA, 27 nt, Artificial Sequence
  Description of Artificial Sequence: Synthetic oligonucleotide
uccucacuacucucaaaucuguucugg

SEQ ID NO: 155197 - RNA, 27 nt, Artificial Sequence
  Description of Artificial Sequence: Synthetic oligonucleotide
uuuguacucaucugcacagcucuggcu

SEQ ID NO: 155198 - RNA, 27 nt, Artificial Sequence
  Description of Artificial Sequence: Synthetic oligonucleotide
gcccauuaacaacaacaaucugaggug

SEQ ID NO: 155199 - RNA, 27 nt, Artificial Sequence
  Description of Artificial Sequence: Synthetic oligonucleotide
aauaaauuaaaaauaauuaaaauagug

SEQ ID NO: 155200 - RNA, 27 nt, Artificial Sequence
  Description of Artificial Sequence: Synthetic oligonucleotide
cauauuuaaauauuaauaaauuaaaaa

SEQ ID NO: 155201 - RNA, 27 nt, Artificial Sequence
  Description of Artificial Sequence: Synthetic oligonucleotide
gaaacaaaggauauucaaacugcauag

SEQ ID NO: 155202 - RNA, 27 nt, Artificial Sequence
  Description of Artificial Sequence: Synthetic oligonucleotide
caaacacuuagacgccagcagcauggg

SEQ ID NO: 155203 - RNA, 27 nt, Artificial Sequence
  Description of Artificial Sequence: Synthetic oligonucleotide
uuugucacaggugaaaugcacaucuga

SEQ ID NO: 155204 - RNA, 27 nt, Artificial Sequence
  Description of Artificial Sequence: Synthetic oligonucleotide
uaauucagccuggcacagguuuugauc

SEQ ID NO: 155205 - RNA, 27 nt, Artificial Sequence
  Description of Artificial Sequence: Synthetic oligonucleotide
auuguaagaaugacuacccacauucac

SEQ ID NO: 155206 - RNA, 27 nt, Artificial Sequence
  Description of Artificial Sequence: Synthetic oligonucleotide
caauuguaagaaugacuacccacauuc

SEQ ID NO: 155207 - RNA, 27 nt, Artificial Sequence
  Description of Artificial Sequence: Synthetic oligonucleotide
guacacucucugaugcucauuuucaua

SEQ ID NO: 155208 - RNA, 27 nt, Artificial Sequence
  Description of Artificial Sequence: Synthetic oligonucleotide
cugcugaguucuacaugaaaagcaaau

SEQ ID NO: 155209 - RNA, 27 nt, Artificial Sequence
  Description of Artificial Sequence: Synthetic oligonucleotide
uacugaaaauaaauauagaaauacaac

SEQ ID NO: 155210 - RNA, 27 nt, Artificial Sequence
  Description of Artificial Sequence: Synthetic oligonucleotide
uuccauuuaagaaacauuaaucaaaac

SEQ ID NO: 155211 - RNA, 27 nt, Artificial Sequence
  Description of Artificial Sequence: Synthetic oligonucleotide
acaauuuuaggcacuauacacguuguu

SEQ ID NO: 155212 - RNA, 27 nt, Artificial Sequence
  Description of Artificial Sequence: Synthetic oligonucleotide
ccagauguuaguagccaaggauauggu

SEQ ID NO: 155213 - RNA, 27 nt, Artificial Sequence
  Description of Artificial Sequence: Synthetic oligonucleotide
agcucacagucuccagauguuaguagc

SEQ ID NO: 155214 - RNA, 27 nt, Artificial Sequence
  Description of Artificial Sequence: Synthetic oligonucleotide
auuaauaaaaagcacacaacuuauggc

SEQ ID NO: 155215 - RNA, 27 nt, Artificial Sequence
  Description of Artificial Sequence: Synthetic oligonucleotide
aauguaagaagagccaaaaugaugcau

SEQ ID NO: 155216 - RNA, 27 nt, Artificial Sequence
  Description of Artificial Sequence: Synthetic oligonucleotide
acauuuuuacaaauguaagaagagcca

SEQ ID NO: 155217 - RNA, 27 nt, Artificial Sequence
  Description of Artificial Sequence: Synthetic oligonucleotide
aauaugaauuaagaugaccuaaucugu

SEQ ID NO: 155218 - RNA, 27 nt, Artificial Sequence
  Description of Artificial Sequence: Synthetic oligonucleotide
ucaugauuaguucuuucaauuccaucc

SEQ ID NO: 155219 - RNA, 27 nt, Artificial Sequence
  Description of Artificial Sequence: Synthetic oligonucleotide
cccaagagcagaaggaaugagugugca

SEQ ID NO: 155220 - RNA, 27 nt, Artificial Sequence
  Description of Artificial Sequence: Synthetic oligonucleotide
cucaaagcuacugguuaccucuacacc

SEQ ID NO: 155221 - RNA, 27 nt, Artificial Sequence
  Description of Artificial Sequence: Synthetic oligonucleotide
ugaaauauuacguggcaugugguuggg

SEQ ID NO: 155222 - RNA, 27 nt, Artificial Sequence
  Description of Artificial Sequence: Synthetic oligonucleotide
agugaagagaauaacuuguuuccgaag

SEQ ID NO: 155223 - RNA, 27 nt, Artificial Sequence
  Description of Artificial Sequence: Synthetic oligonucleotide
uuucuuagcauuaguuauugggaguga

SEQ ID NO: 155224 - RNA, 27 nt, Artificial Sequence
  Description of Artificial Sequence: Synthetic oligonucleotide
uugauuuucagcauuucuuagcauuag

SEQ ID NO: 155225 - RNA, 27 nt, Artificial Sequence
  Description of Artificial Sequence: Synthetic oligonucleotide
aaaguaaucauauuuagagaaagacag

SEQ ID NO: 155226 - RNA, 27 nt, Artificial Sequence
  Description of Artificial Sequence: Synthetic oligonucleotide
uguagaacaaaaugccugaaauucagc

SEQ ID NO: 155227 - RNA, 27 nt, Artificial Sequence
  Description of Artificial Sequence: Synthetic oligonucleotide
gagagucccgggugagagggaaucgcc

SEQ ID NO: 155228 - RNA, 27 nt, Artificial Sequence
  Description of Artificial Sequence: Synthetic oligonucleotide
cuuuacuuuaaagguucacuuuccuug

SEQ ID NO: 155229 - RNA, 27 nt, Artificial Sequence
  Description of Artificial Sequence: Synthetic oligonucleotide
ccaggcuuccagagcaugcagccuccu

SEQ ID NO: 155230 - RNA, 27 nt, Artificial Sequence
  Description of Artificial Sequence: Synthetic oligonucleotide
cucucuuuuguuuucuguucagagaaa

SEQ ID NO: 155231 - RNA, 27 nt, Artificial Sequence
  Description of Artificial Sequence: Synthetic oligonucleotide
cggcauaacugauuacagccaaguuca

SEQ ID NO: 155232 - RNA, 27 nt, Artificial Sequence
  Description of Artificial Sequence: Synthetic oligonucleotide
uggacuucuuuuaauuuuggcuucuuc

SEQ ID NO: 155233 - RNA, 27 nt, Artificial Sequence
  Description of Artificial Sequence: Synthetic oligonucleotide
uaaccucaccuggacuucuuuuaauuu

SEQ ID NO: 155234 - RNA, 27 nt, Artificial Sequence
  Description of Artificial Sequence: Synthetic oligonucleotide
guccucuucccgauaauccggauucag

SEQ ID NO: 155235 - RNA, 27 nt, Artificial Sequence
  Description of Artificial Sequence: Synthetic oligonucleotide
acaauacuugcuuugaugucacauuaa

SEQ ID NO: 155236 - RNA, 27 nt, Artificial Sequence
  Description of Artificial Sequence: Synthetic oligonucleotide
gagugcuacaauacuugcuuugauguc

SEQ ID NO: 155237 - RNA, 27 nt, Artificial Sequence
  Description of Artificial Sequence: Synthetic oligonucleotide
auuugugguuuuguuuucucucucucu

SEQ ID NO: 155238 - RNA, 27 nt, Artificial Sequence
  Description of Artificial Sequence: Synthetic oligonucleotide
uguaugggcuuaaauacuacagcgagg

SEQ ID NO: 155239 - RNA, 27 nt, Artificial Sequence
  Description of Artificial Sequence: Synthetic oligonucleotide
cuguaugggcuuaaauacuacagcgag

SEQ ID NO: 155240 - RNA, 27 nt, Artificial Sequence
  Description of Artificial Sequence: Synthetic oligonucleotide
ggaagguuucuguaugggcuuaaauac

SEQ ID NO: 155241 - RNA, 27 nt, Artificial Sequence
  Description of Artificial Sequence: Synthetic oligonucleotide
guagguauaccauguuuauuuuaauac

SEQ ID NO: 155242 - RNA, 27 nt, Artificial Sequence
  Description of Artificial Sequence: Synthetic oligonucleotide
uccgaaaacuggccgaucagaacagcc

SEQ ID NO: 155243 - RNA, 27 nt, Artificial Sequence
  Description of Artificial Sequence: Synthetic oligonucleotide
cccuguuccaaaguucaaauuauuugu

SEQ ID NO: 155244 - RNA, 27 nt, Artificial Sequence
  Description of Artificial Sequence: Synthetic oligonucleotide
acuggaaaguuaaauuaaggucgcaau

SEQ ID NO: 155245 - RNA, 27 nt, Artificial Sequence
  Description of Artificial Sequence: Synthetic oligonucleotide
caaaaccaaacuuuagcuuucucagcc

SEQ ID NO: 155246 - RNA, 27 nt, Artificial Sequence
  Description of Artificial Sequence: Synthetic oligonucleotide
uacagugggaaguagcaucuuuacuuu

SEQ ID NO: 155247 - RNA, 27 nt, Artificial Sequence
  Description of Artificial Sequence: Synthetic oligonucleotide
ucauaugguaucagcaauuaagcagua

SEQ ID NO: 155248 - RNA, 27 nt, Artificial Sequence
  Description of Artificial Sequence: Synthetic oligonucleotide
cagcccauguuucauucauaugguauc

SEQ ID NO: 155249 - RNA, 27 nt, Artificial Sequence
  Description of Artificial Sequence: Synthetic oligonucleotide
uaugaaaaaguuggauaagaaaguugg

SEQ ID NO: 155250 - RNA, 27 nt, Artificial Sequence
  Description of Artificial Sequence: Synthetic oligonucleotide
uccggccucaugaugucaugcaaggcu

SEQ ID NO: 155251 - RNA, 27 nt, Artificial Sequence
  Description of Artificial Sequence: Synthetic oligonucleotide
acaaaugcagucauauacaaauucagg

SEQ ID NO: 155252 - RNA, 27 nt, Artificial Sequence
  Description of Artificial Sequence: Synthetic oligonucleotide
gguaguaaacauucuacuaggauucuu

SEQ ID NO: 155253 - RNA, 27 nt, Artificial Sequence
  Description of Artificial Sequence: Synthetic oligonucleotide
uuucaucaaaaaauucuucccuuucug

SEQ ID NO: 155254 - RNA, 27 nt, Artificial Sequence
  Description of Artificial Sequence: Synthetic oligonucleotide
aaauucacacacuggcaugccgauagc

SEQ ID NO: 155255 - RNA, 27 nt, Artificial Sequence
  Description of Artificial Sequence: Synthetic oligonucleotide
acauacauugcucuacuaugaggugaa

SEQ ID NO: 155256 - RNA, 27 nt, Artificial Sequence
  Description of Artificial Sequence: Synthetic oligonucleotide
uauauaugugcuuuggcaauucuggug

SEQ ID NO: 155257 - RNA, 27 nt, Artificial Sequence
  Description of Artificial Sequence: Synthetic oligonucleotide
ggagaaacuauuacccagaucaccacu

SEQ ID NO: 155258 - RNA, 27 nt, Artificial Sequence
  Description of Artificial Sequence: Synthetic oligonucleotide
auuuggagaaacuauuacccagaucac

SEQ ID NO: 155259 - RNA, 27 nt, Artificial Sequence
  Description of Artificial Sequence: Synthetic oligonucleotide
uuucuaggaaguauucaucacauccac

SEQ ID NO: 155260 - RNA, 27 nt, Artificial Sequence
  Description of Artificial Sequence: Synthetic oligonucleotide
cauauaugguguagcuguggaaaugcg

SEQ ID NO: 155261 - RNA, 27 nt, Artificial Sequence
  Description of Artificial Sequence: Synthetic oligonucleotide
cuccauucauauaugguguagcugugg

SEQ ID NO: 155262 - RNA, 27 nt, Artificial Sequence
  Description of Artificial Sequence: Synthetic oligonucleotide
aucuucuucucguguaagaacugcagc

SEQ ID NO: 155263 - RNA, 27 nt, Artificial Sequence
  Description of Artificial Sequence: Synthetic oligonucleotide
ucccuguaaaugaucuucuucucgugu

SEQ ID NO: 155264 - RNA, 27 nt, Artificial Sequence
  Description of Artificial Sequence: Synthetic oligonucleotide
gucccuguaaaugaucuucuucucgug

SEQ ID NO: 155265 - RNA, 27 nt, Artificial Sequence
  Description of Artificial Sequence: Synthetic oligonucleotide
ucaggucccuguaaaugaucuucuucu

SEQ ID NO: 155266 - RNA, 27 nt, Artificial Sequence
  Description of Artificial Sequence: Synthetic oligonucleotide
gaugcagucaaacaccucuuccucugu

SEQ ID NO: 155267 - RNA, 27 nt, Artificial Sequence
  Description of Artificial Sequence: Synthetic oligonucleotide
cgaugcagucaaacaccucuuccucug

SEQ ID NO: 155268 - RNA, 27 nt, Artificial Sequence
  Description of Artificial Sequence: Synthetic oligonucleotide
cccugugaacucgcccucaaaguagcg

SEQ ID NO: 155269 - RNA, 27 nt, Artificial Sequence
  Description of Artificial Sequence: Synthetic oligonucleotide
ggacagaggugccaggagaugcccuca

SEQ ID NO: 155270 - RNA, 27 nt, Artificial Sequence
  Description of Artificial Sequence: Synthetic oligonucleotide
uuaaaaagacaaaccauaucacuccuu

SEQ ID NO: 155271 - RNA, 27 nt, Artificial Sequence
  Description of Artificial Sequence: Synthetic oligonucleotide
cuuaaaaagacaaaccauaucacuccu

SEQ ID NO: 155272 - RNA, 27 nt, Artificial Sequence
  Description of Artificial Sequence: Synthetic oligonucleotide
gacaaccuuuaggaucuuuacugcaac

SEQ ID NO: 155273 - RNA, 27 nt, Artificial Sequence
  Description of Artificial Sequence: Synthetic oligonucleotide
gucgacaaccuuuaggaucuuuacugc

SEQ ID NO: 155274 - RNA, 27 nt, Artificial Sequence
  Description of Artificial Sequence: Synthetic oligonucleotide
acaauugccagguuguccuuugucaug

SEQ ID NO: 155275 - RNA, 27 nt, Artificial Sequence
  Description of Artificial Sequence: Synthetic oligonucleotide
ccucgcaccacugggucacaauugcca

SEQ ID NO: 155276 - RNA, 27 nt, Artificial Sequence
  Description of Artificial Sequence: Synthetic oligonucleotide
auuucaugucucuauggaugauguucu

SEQ ID NO: 155277 - RNA, 27 nt, Artificial Sequence
  Description of Artificial Sequence: Synthetic oligonucleotide
uggagaaauauauuguuggauuucaug

SEQ ID NO: 155278 - RNA, 27 nt, Artificial Sequence
  Description of Artificial Sequence: Synthetic oligonucleotide
agccuucauggagaaauauauuguugg

SEQ ID NO: 155279 - RNA, 27 nt, Artificial Sequence
  Description of Artificial Sequence: Synthetic oligonucleotide
accacuccagcgugacuuuacuguugc

SEQ ID NO: 155280 - RNA, 27 nt, Artificial Sequence
  Description of Artificial Sequence: Synthetic oligonucleotide
ccucucuuccuuuacuuucuucacaca

SEQ ID NO: 155281 - RNA, 27 nt, Artificial Sequence
  Description of Artificial Sequence: Synthetic oligonucleotide
gcccgaugcaaggauggcucggaagcg

SEQ ID NO: 155282 - RNA, 27 nt, Artificial Sequence
  Description of Artificial Sequence: Synthetic oligonucleotide
cacaguaggauauucaaccuccauuuc

SEQ ID NO: 155283 - RNA, 27 nt, Artificial Sequence
  Description of Artificial Sequence: Synthetic oligonucleotide
uuacacaguaggauauucaaccuccau

SEQ ID NO: 155284 - RNA, 27 nt, Artificial Sequence
  Description of Artificial Sequence: Synthetic oligonucleotide
uacacuacaagggaaaacucaaaaucu

SEQ ID NO: 155285 - RNA, 27 nt, Artificial Sequence
  Description of Artificial Sequence: Synthetic oligonucleotide
caaucaacaaagaacaaacaggauaaa

SEQ ID NO: 155286 - RNA, 27 nt, Artificial Sequence
  Description of Artificial Sequence: Synthetic oligonucleotide
uuucaaucaacaaagaacaaacaggau

SEQ ID NO: 155287 - RNA, 27 nt, Artificial Sequence
  Description of Artificial Sequence: Synthetic oligonucleotide
auggaagaaaaagaaggcuguagagaa

SEQ ID NO: 155288 - RNA, 27 nt, Artificial Sequence
  Description of Artificial Sequence: Synthetic oligonucleotide
uagaaggaagauuagcuauggaagaaa

SEQ ID NO: 155289 - RNA, 27 nt, Artificial Sequence
  Description of Artificial Sequence: Synthetic oligonucleotide
augaagcauucaacaggaagauuauuu

SEQ ID NO: 155290 - RNA, 27 nt, Artificial Sequence
  Description of Artificial Sequence: Synthetic oligonucleotide
caugaagcauucaacaggaagauuauu

SEQ ID NO: 155291 - RNA, 27 nt, Artificial Sequence
  Description of Artificial Sequence: Synthetic oligonucleotide
ucaaaguagaauucaagucaugaagca

SEQ ID NO: 155292 - RNA, 27 nt, Artificial Sequence
  Description of Artificial Sequence: Synthetic oligonucleotide
gucuguaguugcuucucucccucuuag

SEQ ID NO: 155293 - RNA, 27 nt, Artificial Sequence
  Description of Artificial Sequence: Synthetic oligonucleotide
guugaccuuggucugguaggagacggc

SEQ ID NO: 155294 - RNA, 27 nt, Artificial Sequence
  Description of Artificial Sequence: Synthetic oligonucleotide
gucgagauagucgggccgauugaucuc

SEQ ID NO: 155295 - RNA, 27 nt, Artificial Sequence
  Description of Artificial Sequence: Synthetic oligonucleotide
guuugggaagguuggauguucguccuc

SEQ ID NO: 155296 - RNA, 27 nt, Artificial Sequence
  Description of Artificial Sequence: Synthetic oligonucleotide
aguucuaagcuuggguuccgacccuaa

SEQ ID NO: 155297 - RNA, 27 nt, Artificial Sequence
  Description of Artificial Sequence: Synthetic oligonucleotide
uuaaaguucuaagcuuggguuccgacc

SEQ ID NO: 155298 - RNA, 27 nt, Artificial Sequence
  Description of Artificial Sequence: Synthetic oligonucleotide
guugcuuaaaguucuaagcuuggguuc

SEQ ID NO: 155299 - RNA, 27 nt, Artificial Sequence
  Description of Artificial Sequence: Synthetic oligonucleotide
gugguggucuuguugcuuaaaguucua

SEQ ID NO: 155300 - RNA, 27 nt, Artificial Sequence
  Description of Artificial Sequence: Synthetic oligonucleotide
acuuuauuucucgccacugaauaguag

SEQ ID NO: 155301 - RNA, 27 nt, Artificial Sequence
  Description of Artificial Sequence: Synthetic oligonucleotide
aacuuuauuucucgccacugaauagua

SEQ ID NO: 155302 - RNA, 27 nt, Artificial Sequence
  Description of Artificial Sequence: Synthetic oligonucleotide
ggaucauuuccuguuaucuguguuugu

SEQ ID NO: 155303 - RNA, 27 nt, Artificial Sequence
  Description of Artificial Sequence: Synthetic oligonucleotide
guuucauuucuucucuuuucuuaaggc

SEQ ID NO: 155304 - RNA, 27 nt, Artificial Sequence
  Description of Artificial Sequence: Synthetic oligonucleotide
ggaggauggaaacacacuccuucaguu

SEQ ID NO: 155305 - RNA, 27 nt, Artificial Sequence
  Description of Artificial Sequence: Synthetic oligonucleotide
ucaaagauuuucagucccgcggugaca

SEQ ID NO: 155306 - RNA, 27 nt, Artificial Sequence
  Description of Artificial Sequence: Synthetic oligonucleotide
ccugaacggcacgcuuauuucugcugu

SEQ ID NO: 155307 - RNA, 27 nt, Artificial Sequence
  Description of Artificial Sequence: Synthetic oligonucleotide
cuucuggacccugaacggcacgcuuau

SEQ ID NO: 155308 - RNA, 27 nt, Artificial Sequence
  Description of Artificial Sequence: Synthetic oligonucleotide
caagcagucuugagugacuguuucuuc

SEQ ID NO: 155309 - RNA, 27 nt, Artificial Sequence
  Description of Artificial Sequence: Synthetic oligonucleotide
ccaaagacauggaccuucuuccucuga

SEQ ID NO: 155310 - RNA, 27 nt, Artificial Sequence
  Description of Artificial Sequence: Synthetic oligonucleotide
guguuucaggcauauuuugaauacauc

SEQ ID NO: 155311 - RNA, 27 nt, Artificial Sequence
  Description of Artificial Sequence: Synthetic oligonucleotide
gagguacagagaaagggaggaaaauag

SEQ ID NO: 155312 - RNA, 27 nt, Artificial Sequence
  Description of Artificial Sequence: Synthetic oligonucleotide
ucuugucuugcucuaucuuucuuuggu

SEQ ID NO: 155313 - RNA, 27 nt, Artificial Sequence
  Description of Artificial Sequence: Synthetic oligonucleotide
uuucuugucuugcucuaucuuucuuug

SEQ ID NO: 155314 - RNA, 27 nt, Artificial Sequence
  Description of Artificial Sequence: Synthetic oligonucleotide
ggaucuuguacaaacaaaugcuuucuc

SEQ ID NO: 155315 - RNA, 27 nt, Artificial Sequence
  Description of Artificial Sequence: Synthetic oligonucleotide
ucugcaaguacguucguuuaacucaag

SEQ ID NO: 155316 - RNA, 27 nt, Artificial Sequence
  Description of Artificial Sequence: Synthetic oligonucleotide
ucuguaucgaucguucuguaucagucu

SEQ ID NO: 155317 - RNA, 27 nt, Artificial Sequence
  Description of Artificial Sequence: Synthetic oligonucleotide
auuuauuuuuauauauauauaauauau

SEQ ID NO: 155318 - RNA, 27 nt, Artificial Sequence
  Description of Artificial Sequence: Synthetic oligonucleotide
auauuuauuuuuauauauauauaauau

SEQ ID NO: 155319 - RNA, 27 nt, Artificial Sequence
  Description of Artificial Sequence: Synthetic oligonucleotide
cacagcagucaaauacauccagugaag

SEQ ID NO: 155320 - RNA, 27 nt, Artificial Sequence
  Description of Artificial Sequence: Synthetic oligonucleotide
gucucucaucuccuccucuucccuguc

SEQ ID NO: 155321 - RNA, 27 nt, Artificial Sequence
  Description of Artificial Sequence: Synthetic oligonucleotide
ccaagugggacaaaaaaaagaucaugc

SEQ ID NO: 155322 - RNA, 14 nt, Artificial Sequence
  Description of Artificial Sequence: Synthetic oligonucleotide
guauuuugaugagg

SEQ ID NO: 155323 - RNA, 12 nt, Artificial Sequence
  Description of Artificial Sequence: Synthetic oligonucleotide
ggcccagaugau

SEQ ID NO: 155324 - RNA, 14 nt, Artificial Sequence
  Description of Artificial Sequence: Synthetic oligonucleotide
gggaagaaaacuau

SEQ ID NO: 155325 - RNA, 15 nt, Artificial Sequence
  Description of Artificial Sequence: Synthetic oligonucleotide
guuuuaauuuauuuc

SEQ ID NO: 155326 - RNA, 12 nt, Artificial Sequence
  Description of Artificial Sequence: Synthetic oligonucleotide
acguagggaaau

SEQ ID NO: 155327 - RNA, 12 nt, Artificial Sequence
  Description of Artificial Sequence: Synthetic oligonucleotide
ccaggguuuacc

SEQ ID NO: 155328 - RNA, 11 nt, Artificial Sequence
  Description of Artificial Sequence: Synthetic oligonucleotide
agcaagguuua

SEQ ID NO: 155329 - RNA, 12 nt, Artificial Sequence
  Description of Artificial Sequence: Synthetic oligonucleotide
uguauuauguug

SEQ ID NO: 155330 - RNA, 15 nt, Artificial Sequence
  Description of Artificial Sequence: Synthetic oligonucleotide
uuuuaaucuuuguga

SEQ ID NO: 155331 - RNA, 14 nt, Artificial Sequence
  Description of Artificial Sequence: Synthetic oligonucleotide
uuaaucuuugugac

SEQ ID NO: 155332 - RNA, 13 nt, Artificial Sequence
  Description of Artificial Sequence: Synthetic oligonucleotide
gcugcuuaugucu

SEQ ID NO: 155333 - RNA, 14 nt, Artificial Sequence
  Description of Artificial Sequence: Synthetic oligonucleotide
aaguguuucagaag

SEQ ID NO: 155334 - RNA, 13 nt, Artificial Sequence
  Description of Artificial Sequence: Synthetic oligonucleotide
gaccaucaauaag

SEQ ID NO: 155335 - RNA, 13 nt, Artificial Sequence
  Description of Artificial Sequence: Synthetic oligonucleotide
ccaucaauaagga

SEQ ID NO: 155336 - RNA, 14 nt, Artificial Sequence
  Description of Artificial Sequence: Synthetic oligonucleotide
ucaauaaggaagaa

SEQ ID NO: 155337 - RNA, 14 nt, Artificial Sequence
  Description of Artificial Sequence: Synthetic oligonucleotide
aauaaggaagaagc

SEQ ID NO: 155338 - RNA, 13 nt, Artificial Sequence
  Description of Artificial Sequence: Synthetic oligonucleotide
aggaagaagcccu

SEQ ID NO: 155339 - RNA, 13 nt, Artificial Sequence
  Description of Artificial Sequence: Synthetic oligonucleotide
gcauaacuaaagg

SEQ ID NO: 155340 - RNA, 14 nt, Artificial Sequence
  Description of Artificial Sequence: Synthetic oligonucleotide
cauaacuaaaggug

SEQ ID NO: 155341 - RNA, 12 nt, Artificial Sequence
  Description of Artificial Sequence: Synthetic oligonucleotide
cuacaucacgcc

SEQ ID NO: 155342 - RNA, 12 nt, Artificial Sequence
  Description of Artificial Sequence: Synthetic oligonucleotide
acuggauuuaag

SEQ ID NO: 155343 - RNA, 12 nt, Artificial Sequence
  Description of Artificial Sequence: Synthetic oligonucleotide
cuggauuuaagc

SEQ ID NO: 155344 - RNA, 13 nt, Artificial Sequence
  Description of Artificial Sequence: Synthetic oligonucleotide
gauuuaagcagag

SEQ ID NO: 155345 - RNA, 13 nt, Artificial Sequence
  Description of Artificial Sequence: Synthetic oligonucleotide
auuuaagcagagu

SEQ ID NO: 155346 - RNA, 13 nt, Artificial Sequence
  Description of Artificial Sequence: Synthetic oligonucleotide
uuaagcagaguuc

SEQ ID NO: 155347 - RNA, 13 nt, Artificial Sequence
  Description of Artificial Sequence: Synthetic oligonucleotide
uaagcagaguuca

SEQ ID NO: 155348 - RNA, 14 nt, Artificial Sequence
  Description of Artificial Sequence: Synthetic oligonucleotide
agcagaguucaaaa

SEQ ID NO: 155349 - RNA, 12 nt, Artificial Sequence
  Description of Artificial Sequence: Synthetic oligonucleotide
cucagggucuga

SEQ ID NO: 155350 - RNA, 13 nt, Artificial Sequence
  Description of Artificial Sequence: Synthetic oligonucleotide
caagcaacuacau

SEQ ID NO: 155351 - RNA, 12 nt, Artificial Sequence
  Description of Artificial Sequence: Synthetic oligonucleotide
aucaauggcagc

SEQ ID NO: 155352 - RNA, 11 nt, Artificial Sequence
  Description of Artificial Sequence: Synthetic oligonucleotide
uuccagcccac

SEQ ID NO: 155353 - RNA, 12 nt, Artificial Sequence
  Description of Artificial Sequence: Synthetic oligonucleotide
cagcugagaaug

SEQ ID NO: 155354 - RNA, 13 nt, Artificial Sequence
  Description of Artificial Sequence: Synthetic oligonucleotide
aacguaucuccua

SEQ ID NO: 155355 - RNA, 14 nt, Artificial Sequence
  Description of Artificial Sequence: Synthetic oligonucleotide
ccuaaaauaauuuc

SEQ ID NO: 155356 - RNA, 13 nt, Artificial Sequence
  Description of Artificial Sequence: Synthetic oligonucleotide
uggaagauucagc

SEQ ID NO: 155357 - RNA, 12 nt, Artificial Sequence
  Description of Artificial Sequence: Synthetic oligonucleotide
uuaaacucuccu

SEQ ID NO: 155358 - RNA, 12 nt, Artificial Sequence
  Description of Artificial Sequence: Synthetic oligonucleotide
cagccuacaguu

SEQ ID NO: 155359 - RNA, 13 nt, Artificial Sequence
  Description of Artificial Sequence: Synthetic oligonucleotide
guuauguucaguc

SEQ ID NO: 155360 - RNA, 13 nt, Artificial Sequence
  Description of Artificial Sequence: Synthetic oligonucleotide
cacauacaaaaug

SEQ ID NO: 155361 - RNA, 9 nt, Artificial Sequence
  Description of Artificial Sequence: Synthetic oligonucleotide
uccuuuugc

SEQ ID NO: 155362 - RNA, 12 nt, Artificial Sequence
  Description of Artificial Sequence: Synthetic oligonucleotide
ugaccugugaag

SEQ ID NO: 155363 - RNA, 12 nt, Artificial Sequence
  Description of Artificial Sequence: Synthetic oligonucleotide
cuaucucacaca

SEQ ID NO: 155364 - RNA, 13 nt, Artificial Sequence
  Description of Artificial Sequence: Synthetic oligonucleotide
uguccucaauugu

SEQ ID NO: 155365 - RNA, 12 nt, Artificial Sequence
  Description of Artificial Sequence: Synthetic oligonucleotide
aaaccguagcug

SEQ ID NO: 155366 - RNA, 12 nt, Artificial Sequence
  Description of Artificial Sequence: Synthetic oligonucleotide
uagcuggcaagc

SEQ ID NO: 155367 - RNA, 14 nt, Artificial Sequence
  Description of Artificial Sequence: Synthetic oligonucleotide
uuguaugguuaaaa

SEQ ID NO: 155368 - RNA, 14 nt, Artificial Sequence
  Description of Artificial Sequence: Synthetic oligonucleotide
ugguuaaaagaugg

SEQ ID NO: 155369 - RNA, 13 nt, Artificial Sequence
  Description of Artificial Sequence: Synthetic oligonucleotide
cagggaauuauac

SEQ ID NO: 155370 - RNA, 12 nt, Artificial Sequence
  Description of Artificial Sequence: Synthetic oligonucleotide
acaaucuugcug

SEQ ID NO: 155371 - RNA, 13 nt, Artificial Sequence
  Description of Artificial Sequence: Synthetic oligonucleotide
ccaauaaugaaga

SEQ ID NO: 155372 - RNA, 13 nt, Artificial Sequence
  Description of Artificial Sequence: Synthetic oligonucleotide
acuuuggauguuc

SEQ ID NO: 155373 - RNA, 12 nt, Artificial Sequence
  Description of Artificial Sequence: Synthetic oligonucleotide
aaugcuuccacu

SEQ ID NO: 155374 - RNA, 11 nt, Artificial Sequence
  Description of Artificial Sequence: Synthetic oligonucleotide
gagaaaguuug

SEQ ID NO: 155375 - RNA, 11 nt, Artificial Sequence
  Description of Artificial Sequence: Synthetic oligonucleotide
aaagaacuacu

SEQ ID NO: 155376 - RNA, 12 nt, Artificial Sequence
  Description of Artificial Sequence: Synthetic oligonucleotide
uuagaaauacgg

SEQ ID NO: 155377 - RNA, 12 nt, Artificial Sequence
  Description of Artificial Sequence: Synthetic oligonucleotide
aacauggguaca

SEQ ID NO: 155378 - RNA, 14 nt, Artificial Sequence
  Description of Artificial Sequence: Synthetic oligonucleotide
aaagacacagaaga

SEQ ID NO: 155379 - RNA, 11 nt, Artificial Sequence
  Description of Artificial Sequence: Synthetic oligonucleotide
uaguagggagg

SEQ ID NO: 155380 - RNA, 12 nt, Artificial Sequence
  Description of Artificial Sequence: Synthetic oligonucleotide
gccuucugcagc

SEQ ID NO: 155381 - RNA, 10 nt, Artificial Sequence
  Description of Artificial Sequence: Synthetic oligonucleotide
ggucugguac

SEQ ID NO: 155382 - RNA, 12 nt, Artificial Sequence
  Description of Artificial Sequence: Synthetic oligonucleotide
cuaguccuuccg

SEQ ID NO: 155383 - RNA, 12 nt, Artificial Sequence
  Description of Artificial Sequence: Synthetic oligonucleotide
ccagugaauauu

SEQ ID NO: 155384 - RNA, 13 nt, Artificial Sequence
  Description of Artificial Sequence: Synthetic oligonucleotide
augaauucaaguu

SEQ ID NO: 155385 - RNA, 12 nt, Artificial Sequence
  Description of Artificial Sequence: Synthetic oligonucleotide
caggacacagau

SEQ ID NO: 155386 - RNA, 12 nt, Artificial Sequence
  Description of Artificial Sequence: Synthetic oligonucleotide
cucaaagcacag

SEQ ID NO: 155387 - RNA, 10 nt, Artificial Sequence
  Description of Artificial Sequence: Synthetic oligonucleotide
accacugcca

SEQ ID NO: 155388 - RNA, 13 nt, Artificial Sequence
  Description of Artificial Sequence: Synthetic oligonucleotide
gaaacuacuagug

SEQ ID NO: 155389 - RNA, 12 nt, Artificial Sequence
  Description of Artificial Sequence: Synthetic oligonucleotide
aagucggacagc

SEQ ID NO: 155390 - RNA, 13 nt, Artificial Sequence
  Description of Artificial Sequence: Synthetic oligonucleotide
gaaagcgaaaaau

SEQ ID NO: 155391 - RNA, 13 nt, Artificial Sequence
  Description of Artificial Sequence: Synthetic oligonucleotide
cccucugauuuag

SEQ ID NO: 155392 - RNA, 12 nt, Artificial Sequence
  Description of Artificial Sequence: Synthetic oligonucleotide
ugagcuauuuaa

SEQ ID NO: 155393 - RNA, 13 nt, Artificial Sequence
  Description of Artificial Sequence: Synthetic oligonucleotide
aaaaggugaaaaa

SEQ ID NO: 155394 - RNA, 14 nt, Artificial Sequence
  Description of Artificial Sequence: Synthetic oligonucleotide
gaaaaagcacuauu

SEQ ID NO: 155395 - RNA, 12 nt, Artificial Sequence
  Description of Artificial Sequence: Synthetic oligonucleotide
ggcugaaaagaa

SEQ ID NO: 155396 - RNA, 12 nt, Artificial Sequence
  Description of Artificial Sequence: Synthetic oligonucleotide
uaaacccuuaua

SEQ ID NO: 155397 - RNA, 13 nt, Artificial Sequence
  Description of Artificial Sequence: Synthetic oligonucleotide
cauacuauuagcc

SEQ ID NO: 155398 - RNA, 12 nt, Artificial Sequence
  Description of Artificial Sequence: Synthetic oligonucleotide
gacagaagcauu

SEQ ID NO: 155399 - RNA, 14 nt, Artificial Sequence
  Description of Artificial Sequence: Synthetic oligonucleotide
agagcaaauaagau

SEQ ID NO: 155400 - RNA, 14 nt, Artificial Sequence
  Description of Artificial Sequence: Synthetic oligonucleotide
ccaacauuuuucuc

SEQ ID NO: 155401 - RNA, 15 nt, Artificial Sequence
  Description of Artificial Sequence: Synthetic oligonucleotide
uuaaguaugagaaaa

SEQ ID NO: 155402 - RNA, 14 nt, Artificial Sequence
  Description of Artificial Sequence: Synthetic oligonucleotide
caggaauaaagaug

SEQ ID NO: 155403 - RNA, 13 nt, Artificial Sequence
  Description of Artificial Sequence: Synthetic oligonucleotide
aauuugaaugacc

SEQ ID NO: 155404 - RNA, 14 nt, Artificial Sequence
  Description of Artificial Sequence: Synthetic oligonucleotide
auguauaaagauag

SEQ ID NO: 155405 - RNA, 12 nt, Artificial Sequence
  Description of Artificial Sequence: Synthetic oligonucleotide
ggcuguaacuau

SEQ ID NO: 155406 - RNA, 11 nt, Artificial Sequence
  Description of Artificial Sequence: Synthetic oligonucleotide
ucugugaagug

SEQ ID NO: 155407 - RNA, 14 nt, Artificial Sequence
  Description of Artificial Sequence: Synthetic oligonucleotide
ccuuuaaggaaaug

SEQ ID NO: 155408 - RNA, 13 nt, Artificial Sequence
  Description of Artificial Sequence: Synthetic oligonucleotide
aaggauacaaaaa

SEQ ID NO: 155409 - RNA, 12 nt, Artificial Sequence
  Description of Artificial Sequence: Synthetic oligonucleotide
agaugcaauuug

SEQ ID NO: 155410 - RNA, 12 nt, Artificial Sequence
  Description of Artificial Sequence: Synthetic oligonucleotide
guucaaaacgaa

SEQ ID NO: 155411 - RNA, 11 nt, Artificial Sequence
  Description of Artificial Sequence: Synthetic oligonucleotide
gugaaaccuca

SEQ ID NO: 155412 - RNA, 13 nt, Artificial Sequence
  Description of Artificial Sequence: Synthetic oligonucleotide
acgaaagagaagc

SEQ ID NO: 155413 - RNA, 12 nt, Artificial Sequence
  Description of Artificial Sequence: Synthetic oligonucleotide
cuccacaagcgc

SEQ ID NO: 155414 - RNA, 14 nt, Artificial Sequence
  Description of Artificial Sequence: Synthetic oligonucleotide
gagaagauuccaaa

SEQ ID NO: 155415 - RNA, 13 nt, Artificial Sequence
  Description of Artificial Sequence: Synthetic oligonucleotide
aaucuggauucaa

SEQ ID NO: 155416 - RNA, 13 nt, Artificial Sequence
  Description of Artificial Sequence: Synthetic oligonucleotide
agaacagauuuga

SEQ ID NO: 155417 - RNA, 11 nt, Artificial Sequence
  Description of Artificial Sequence: Synthetic oligonucleotide
ccagagcugug

SEQ ID NO: 155418 - RNA, 12 nt, Artificial Sequence
  Description of Artificial Sequence: Synthetic oligonucleotide
ccucagauuguu

SEQ ID NO: 155419 - RNA, 12 nt, Artificial Sequence
  Description of Artificial Sequence: Synthetic oligonucleotide
cuauuuuaauua

SEQ ID NO: 155420 - RNA, 13 nt, Artificial Sequence
  Description of Artificial Sequence: Synthetic oligonucleotide
uuuaauuuauuaa

SEQ ID NO: 155421 - RNA, 12 nt, Artificial Sequence
  Description of Artificial Sequence: Synthetic oligonucleotide
augcaguuugaa

SEQ ID NO: 155422 - RNA, 11 nt, Artificial Sequence
  Description of Artificial Sequence: Synthetic oligonucleotide
caugcugcugg

SEQ ID NO: 155423 - RNA, 13 nt, Artificial Sequence
  Description of Artificial Sequence: Synthetic oligonucleotide
agaugugcauuuc

SEQ ID NO: 155424 - RNA, 12 nt, Artificial Sequence
  Description of Artificial Sequence: Synthetic oligonucleotide
ucaaaaccugug

SEQ ID NO: 155425 - RNA, 11 nt, Artificial Sequence
  Description of Artificial Sequence: Synthetic oligonucleotide
gaaugugggua

SEQ ID NO: 155426 - RNA, 10 nt, Artificial Sequence
  Description of Artificial Sequence: Synthetic oligonucleotide
auguggguag

SEQ ID NO: 155427 - RNA, 13 nt, Artificial Sequence
  Description of Artificial Sequence: Synthetic oligonucleotide
ugaaaaugagcau

SEQ ID NO: 155428 - RNA, 13 nt, Artificial Sequence
  Description of Artificial Sequence: Synthetic oligonucleotide
uugcuuuucaugu

SEQ ID NO: 155429 - RNA, 12 nt, Artificial Sequence
  Description of Artificial Sequence: Synthetic oligonucleotide
uguauuucuaua

SEQ ID NO: 155430 - RNA, 13 nt, Artificial Sequence
  Description of Artificial Sequence: Synthetic oligonucleotide
uuugauuaauguu

SEQ ID NO: 155431 - RNA, 12 nt, Artificial Sequence
  Description of Artificial Sequence: Synthetic oligonucleotide
caacguguauag

SEQ ID NO: 155432 - RNA, 12 nt, Artificial Sequence
  Description of Artificial Sequence: Synthetic oligonucleotide
cauauccuuggc

SEQ ID NO: 155433 - RNA, 13 nt, Artificial Sequence
  Description of Artificial Sequence: Synthetic oligonucleotide
uacuaacaucugg

SEQ ID NO: 155434 - RNA, 11 nt, Artificial Sequence
  Description of Artificial Sequence: Synthetic oligonucleotide
cauaaguugug

SEQ ID NO: 155435 - RNA, 12 nt, Artificial Sequence
  Description of Artificial Sequence: Synthetic oligonucleotide
gcaucauuuugg

SEQ ID NO: 155436 - RNA, 10 nt, Artificial Sequence
  Description of Artificial Sequence: Synthetic oligonucleotide
gcucuucuua

SEQ ID NO: 155437 - RNA, 10 nt, Artificial Sequence
  Description of Artificial Sequence: Synthetic oligonucleotide
agauuagguc

SEQ ID NO: 155438 - RNA, 12 nt, Artificial Sequence
  Description of Artificial Sequence: Synthetic oligonucleotide
auggaauugaaa

SEQ ID NO: 155439 - RNA, 13 nt, Artificial Sequence
  Description of Artificial Sequence: Synthetic oligonucleotide
cacacucauuccu

SEQ ID NO: 155440 - RNA, 12 nt, Artificial Sequence
  Description of Artificial Sequence: Synthetic oligonucleotide
uguagagguaac

SEQ ID NO: 155441 - RNA, 11 nt, Artificial Sequence
  Description of Artificial Sequence: Synthetic oligonucleotide
caaccacaugc

SEQ ID NO: 155442 - RNA, 12 nt, Artificial Sequence
  Description of Artificial Sequence: Synthetic oligonucleotide
ucggaaacaagu

SEQ ID NO: 155443 - RNA, 11 nt, Artificial Sequence
  Description of Artificial Sequence: Synthetic oligonucleotide
acucccaauaa

SEQ ID NO: 155444 - RNA, 13 nt, Artificial Sequence
  Description of Artificial Sequence: Synthetic oligonucleotide
aaugcuaagaaau

SEQ ID NO: 155445 - RNA, 11 nt, Artificial Sequence
  Description of Artificial Sequence: Synthetic oligonucleotide
gucuuucucua

SEQ ID NO: 155446 - RNA, 11 nt, Artificial Sequence
  Description of Artificial Sequence: Synthetic oligonucleotide
ugaauuucagg

SEQ ID NO: 155447 - RNA, 13 nt, Artificial Sequence
  Description of Artificial Sequence: Synthetic oligonucleotide
cgauucccucuca

SEQ ID NO: 155448 - RNA, 11 nt, Artificial Sequence
  Description of Artificial Sequence: Synthetic oligonucleotide
aggaaagugaa

SEQ ID NO: 155449 - RNA, 12 nt, Artificial Sequence
  Description of Artificial Sequence: Synthetic oligonucleotide
gaggcugcaugc

SEQ ID NO: 155450 - RNA, 11 nt, Artificial Sequence
  Description of Artificial Sequence: Synthetic oligonucleotide
ucucugaacag

SEQ ID NO: 155451 - RNA, 12 nt, Artificial Sequence
  Description of Artificial Sequence: Synthetic oligonucleotide
aacuuggcugua

SEQ ID NO: 155452 - RNA, 12 nt, Artificial Sequence
  Description of Artificial Sequence: Synthetic oligonucleotide
agaagccaaaau

SEQ ID NO: 155453 - RNA, 14 nt, Artificial Sequence
  Description of Artificial Sequence: Synthetic oligonucleotide
auuaaaagaagucc

SEQ ID NO: 155454 - RNA, 14 nt, Artificial Sequence
  Description of Artificial Sequence: Synthetic oligonucleotide
gaauccggauuauc

SEQ ID NO: 155455 - RNA, 12 nt, Artificial Sequence
  Description of Artificial Sequence: Synthetic oligonucleotide
aaugugacauca

SEQ ID NO: 155456 - RNA, 13 nt, Artificial Sequence
  Description of Artificial Sequence: Synthetic oligonucleotide
caucaaagcaagu

SEQ ID NO: 155457 - RNA, 11 nt, Artificial Sequence
  Description of Artificial Sequence: Synthetic oligonucleotide
agagagagaaa

SEQ ID NO: 155458 - RNA, 13 nt, Artificial Sequence
  Description of Artificial Sequence: Synthetic oligonucleotide
ucgcuguaguauu

SEQ ID NO: 155459 - RNA, 14 nt, Artificial Sequence
  Description of Artificial Sequence: Synthetic oligonucleotide
cgcuguaguauuua

SEQ ID NO: 155460 - RNA, 13 nt, Artificial Sequence
  Description of Artificial Sequence: Synthetic oligonucleotide
auuuaagcccaua

SEQ ID NO: 155461 - RNA, 15 nt, Artificial Sequence
  Description of Artificial Sequence: Synthetic oligonucleotide
auuaaaauaaacaug

SEQ ID NO: 155462 - RNA, 12 nt, Artificial Sequence
  Description of Artificial Sequence: Synthetic oligonucleotide
cuguucugaucg

SEQ ID NO: 155463 - RNA, 16 nt, Artificial Sequence
  Description of Artificial Sequence: Synthetic oligonucleotide
aaauaauuugaacuuu

SEQ ID NO: 155464 - RNA, 12 nt, Artificial Sequence
  Description of Artificial Sequence: Synthetic oligonucleotide
ugcgaccuuaau

SEQ ID NO: 155465 - RNA, 11 nt, Artificial Sequence
  Description of Artificial Sequence: Synthetic oligonucleotide
cugagaaagcu

SEQ ID NO: 155466 - RNA, 13 nt, Artificial Sequence
  Description of Artificial Sequence: Synthetic oligonucleotide
aguaaagaugcua

SEQ ID NO: 155467 - RNA, 12 nt, Artificial Sequence
  Description of Artificial Sequence: Synthetic oligonucleotide
cugcuuaauugc

SEQ ID NO: 155468 - RNA, 14 nt, Artificial Sequence
  Description of Artificial Sequence: Synthetic oligonucleotide
uaccauaugaauga

SEQ ID NO: 155469 - RNA, 12 nt, Artificial Sequence
  Description of Artificial Sequence: Synthetic oligonucleotide
aacuuucuuauc

SEQ ID NO: 155470 - RNA, 13 nt, Artificial Sequence
  Description of Artificial Sequence: Synthetic oligonucleotide
ccuugcaugacau

SEQ ID NO: 155471 - RNA, 14 nt, Artificial Sequence
  Description of Artificial Sequence: Synthetic oligonucleotide
ugaauuuguauaug

SEQ ID NO: 155472 - RNA, 12 nt, Artificial Sequence
  Description of Artificial Sequence: Synthetic oligonucleotide
gaauccuaguag

SEQ ID NO: 155473 - RNA, 10 nt, Artificial Sequence
  Description of Artificial Sequence: Synthetic oligonucleotide
gaaagggaag

SEQ ID NO: 155474 - RNA, 11 nt, Artificial Sequence
  Description of Artificial Sequence: Synthetic oligonucleotide
uaucggcaugc

SEQ ID NO: 155475 - RNA, 12 nt, Artificial Sequence
  Description of Artificial Sequence: Synthetic oligonucleotide
caccucauagua

SEQ ID NO: 155476 - RNA, 11 nt, Artificial Sequence
  Description of Artificial Sequence: Synthetic oligonucleotide
ccagaauugcc

SEQ ID NO: 155477 - RNA, 11 nt, Artificial Sequence
  Description of Artificial Sequence: Synthetic oligonucleotide
uggugaucugg

SEQ ID NO: 155478 - RNA, 12 nt, Artificial Sequence
  Description of Artificial Sequence: Synthetic oligonucleotide
gaucuggguaau

SEQ ID NO: 155479 - RNA, 12 nt, Artificial Sequence
  Description of Artificial Sequence: Synthetic oligonucleotide
ggaugugaugaa

SEQ ID NO: 155480 - RNA, 12 nt, Artificial Sequence
  Description of Artificial Sequence: Synthetic oligonucleotide
cauuuccacagc

SEQ ID NO: 155481 - RNA, 11 nt, Artificial Sequence
  Description of Artificial Sequence: Synthetic oligonucleotide
acagcuacacc

SEQ ID NO: 155482 - RNA, 12 nt, Artificial Sequence
  Description of Artificial Sequence: Synthetic oligonucleotide
ugcaguucuuac

SEQ ID NO: 155483 - RNA, 12 nt, Artificial Sequence
  Description of Artificial Sequence: Synthetic oligonucleotide
acgagaagaaga

SEQ ID NO: 155484 - RNA, 12 nt, Artificial Sequence
  Description of Artificial Sequence: Synthetic oligonucleotide
cgagaagaagau

SEQ ID NO: 155485 - RNA, 15 nt, Artificial Sequence
  Description of Artificial Sequence: Synthetic oligonucleotide
aagaagaucauuuac

SEQ ID NO: 155486 - RNA, 11 nt, Artificial Sequence
  Description of Artificial Sequence: Synthetic oligonucleotide
agaggaagagg

SEQ ID NO: 155487 - RNA, 12 nt, Artificial Sequence
  Description of Artificial Sequence: Synthetic oligonucleotide
gaggaagaggug

SEQ ID NO: 155488 - RNA, 13 nt, Artificial Sequence
  Description of Artificial Sequence: Synthetic oligonucleotide
cuacuuugagggc

SEQ ID NO: 155489 - RNA, 12 nt, Artificial Sequence
  Description of Artificial Sequence: Synthetic oligonucleotide
agggcaucuccu

SEQ ID NO: 155490 - RNA, 10 nt, Artificial Sequence
  Description of Artificial Sequence: Synthetic oligonucleotide
ggagugauau

SEQ ID NO: 155491 - RNA, 11 nt, Artificial Sequence
  Description of Artificial Sequence: Synthetic oligonucleotide
gagugauaugg

SEQ ID NO: 155492 - RNA, 12 nt, Artificial Sequence
  Description of Artificial Sequence: Synthetic oligonucleotide
ugcaguaaagau

SEQ ID NO: 155493 - RNA, 13 nt, Artificial Sequence
  Description of Artificial Sequence: Synthetic oligonucleotide
aguaaagauccua

SEQ ID NO: 155494 - RNA, 12 nt, Artificial Sequence
  Description of Artificial Sequence: Synthetic oligonucleotide
ugacaaaggaca

SEQ ID NO: 155495 - RNA, 13 nt, Artificial Sequence
  Description of Artificial Sequence: Synthetic oligonucleotide
gcaauugugaccc

SEQ ID NO: 155496 - RNA, 12 nt, Artificial Sequence
  Description of Artificial Sequence: Synthetic oligonucleotide
aacaucauccau

SEQ ID NO: 155497 - RNA, 12 nt, Artificial Sequence
  Description of Artificial Sequence: Synthetic oligonucleotide
ugaaauccaaca

SEQ ID NO: 155498 - RNA, 15 nt, Artificial Sequence
  Description of Artificial Sequence: Synthetic oligonucleotide
aacaauauauuucuc

SEQ ID NO: 155499 - RNA, 14 nt, Artificial Sequence
  Description of Artificial Sequence: Synthetic oligonucleotide
aacaguaaagucac

SEQ ID NO: 155500 - RNA, 14 nt, Artificial Sequence
  Description of Artificial Sequence: Synthetic oligonucleotide
ugugaagaaaguaa

SEQ ID NO: 155501 - RNA, 13 nt, Artificial Sequence
  Description of Artificial Sequence: Synthetic oligonucleotide
cuuccgagccauc

SEQ ID NO: 155502 - RNA, 12 nt, Artificial Sequence
  Description of Artificial Sequence: Synthetic oligonucleotide
aauggagguuga

SEQ ID NO: 155503 - RNA, 12 nt, Artificial Sequence
  Description of Artificial Sequence: Synthetic oligonucleotide
ggagguugaaua

SEQ ID NO: 155504 - RNA, 13 nt, Artificial Sequence
  Description of Artificial Sequence: Synthetic oligonucleotide
auuuugaguuuuc

SEQ ID NO: 155505 - RNA, 12 nt, Artificial Sequence
  Description of Artificial Sequence: Synthetic oligonucleotide
uauccuguuugu

SEQ ID NO: 155506 - RNA, 11 nt, Artificial Sequence
  Description of Artificial Sequence: Synthetic oligonucleotide
ccuguuuguuc

SEQ ID NO: 155507 - RNA, 10 nt, Artificial Sequence
  Description of Artificial Sequence: Synthetic oligonucleotide
cucuacagcc

SEQ ID NO: 155508 - RNA, 12 nt, Artificial Sequence
  Description of Artificial Sequence: Synthetic oligonucleotide
ucuuccauagcu

SEQ ID NO: 155509 - RNA, 12 nt, Artificial Sequence
  Description of Artificial Sequence: Synthetic oligonucleotide
auaaucuuccug

SEQ ID NO: 155510 - RNA, 12 nt, Artificial Sequence
  Description of Artificial Sequence: Synthetic oligonucleotide
uaaucuuccugu

SEQ ID NO: 155511 - RNA, 12 nt, Artificial Sequence
  Description of Artificial Sequence: Synthetic oligonucleotide
cuucaugacuug

SEQ ID NO: 155512 - RNA, 12 nt, Artificial Sequence
  Description of Artificial Sequence: Synthetic oligonucleotide
aagagggagaga

SEQ ID NO: 155513 - RNA, 12 nt, Artificial Sequence
  Description of Artificial Sequence: Synthetic oligonucleotide
cgucuccuacca

SEQ ID NO: 155514 - RNA, 12 nt, Artificial Sequence
  Description of Artificial Sequence: Synthetic oligonucleotide
gaucaaucggcc

SEQ ID NO: 155515 - RNA, 12 nt, Artificial Sequence
  Description of Artificial Sequence: Synthetic oligonucleotide
ggacgaacaucc

SEQ ID NO: 155516 - RNA, 11 nt, Artificial Sequence
  Description of Artificial Sequence: Synthetic oligonucleotide
agggucggaac

SEQ ID NO: 155517 - RNA, 10 nt, Artificial Sequence
  Description of Artificial Sequence: Synthetic oligonucleotide
ucggaaccca

SEQ ID NO: 155518 - RNA, 11 nt, Artificial Sequence
  Description of Artificial Sequence: Synthetic oligonucleotide
acccaagcuua

SEQ ID NO: 155519 - RNA, 14 nt, Artificial Sequence
  Description of Artificial Sequence: Synthetic oligonucleotide
gaacuuuaagcaac

SEQ ID NO: 155520 - RNA, 11 nt, Artificial Sequence
  Description of Artificial Sequence: Synthetic oligonucleotide
acuauucagug

SEQ ID NO: 155521 - RNA, 11 nt, Artificial Sequence
  Description of Artificial Sequence: Synthetic oligonucleotide
cuauucagugg

SEQ ID NO: 155522 - RNA, 13 nt, Artificial Sequence
  Description of Artificial Sequence: Synthetic oligonucleotide
aaacacagauaac

SEQ ID NO: 155523 - RNA, 12 nt, Artificial Sequence
  Description of Artificial Sequence: Synthetic oligonucleotide
cuuaagaaaaga

SEQ ID NO: 155524 - RNA, 12 nt, Artificial Sequence
  Description of Artificial Sequence: Synthetic oligonucleotide
cugaaggagugu

SEQ ID NO: 155525 - RNA, 10 nt, Artificial Sequence
  Description of Artificial Sequence: Synthetic oligonucleotide
ucaccgcggg

SEQ ID NO: 155526 - RNA, 14 nt, Artificial Sequence
  Description of Artificial Sequence: Synthetic oligonucleotide
agcagaaauaagcg

SEQ ID NO: 155527 - RNA, 12 nt, Artificial Sequence
  Description of Artificial Sequence: Synthetic oligonucleotide
aagcgugccguu

SEQ ID NO: 155528 - RNA, 12 nt, Artificial Sequence
  Description of Artificial Sequence: Synthetic oligonucleotide
agaaacagucac

SEQ ID NO: 155529 - RNA, 12 nt, Artificial Sequence
  Description of Artificial Sequence: Synthetic oligonucleotide
agaggaagaagg

SEQ ID NO: 155530 - RNA, 14 nt, Artificial Sequence
  Description of Artificial Sequence: Synthetic oligonucleotide
uguauucaaaauau

SEQ ID NO: 155531 - RNA, 13 nt, Artificial Sequence
  Description of Artificial Sequence: Synthetic oligonucleotide
auuuuccucccuu

SEQ ID NO: 155532 - RNA, 13 nt, Artificial Sequence
  Description of Artificial Sequence: Synthetic oligonucleotide
caaagaaagauag

SEQ ID NO: 155533 - RNA, 12 nt, Artificial Sequence
  Description of Artificial Sequence: Synthetic oligonucleotide
aagaaagauaga

SEQ ID NO: 155534 - RNA, 13 nt, Artificial Sequence
  Description of Artificial Sequence: Synthetic oligonucleotide
gaaagcauuuguu

SEQ ID NO: 155535 - RNA, 13 nt, Artificial Sequence
  Description of Artificial Sequence: Synthetic oligonucleotide
ugaguuaaacgaa

SEQ ID NO: 155536 - RNA, 12 nt, Artificial Sequence
  Description of Artificial Sequence: Synthetic oligonucleotide
acugauacagaa

SEQ ID NO: 155537 - RNA, 12 nt, Artificial Sequence
  Description of Artificial Sequence: Synthetic oligonucleotide
auauuauauaua

SEQ ID NO: 155538 - RNA, 12 nt, Artificial Sequence
  Description of Artificial Sequence: Synthetic oligonucleotide
auuauauauaua

SEQ ID NO: 155539 - RNA, 12 nt, Artificial Sequence
  Description of Artificial Sequence: Synthetic oligonucleotide
ucacuggaugua

SEQ ID NO: 155540 - RNA, 12 nt, Artificial Sequence
  Description of Artificial Sequence: Synthetic oligonucleotide
cagggaagagga

SEQ ID NO: 155541 - RNA, 15 nt, Artificial Sequence
  Description of Artificial Sequence: Synthetic oligonucleotide
augaucuuuuuuuug

SEQ ID NO: 155542 - RNA, 11 nt, Artificial Sequence
  Description of Artificial Sequence: Synthetic oligonucleotide
aguucacggcc

SEQ ID NO: 155543 - RNA, 13 nt, Artificial Sequence
  Description of Artificial Sequence: Synthetic oligonucleotide
caccaucacacca

SEQ ID NO: 155544 - RNA, 11 nt, Artificial Sequence
  Description of Artificial Sequence: Synthetic oligonucleotide
ccugcggguuu

SEQ ID NO: 155545 - RNA, 10 nt, Artificial Sequence
  Description of Artificial Sequence: Synthetic oligonucleotide
auccaguuug

SEQ ID NO: 155546 - RNA, 13 nt, Artificial Sequence
  Description of Artificial Sequence: Synthetic oligonucleotide
guuaaggacuucu

SEQ ID NO: 155547 - RNA, 13 nt, Artificial Sequence
  Description of Artificial Sequence: Synthetic oligonucleotide
cagugggacagag

SEQ ID NO: 155548 - RNA, 14 nt, Artificial Sequence
  Description of Artificial Sequence: Synthetic oligonucleotide
aauuuguuauugug

SEQ ID NO: 155549 - RNA, 13 nt, Artificial Sequence
  Description of Artificial Sequence: Synthetic oligonucleotide
uucaaaugcauuu

SEQ ID NO: 155550 - RNA, 10 nt, Artificial Sequence
  Description of Artificial Sequence: Synthetic oligonucleotide
caggaaagcc

SEQ ID NO: 155551 - RNA, 11 nt, Artificial Sequence
  Description of Artificial Sequence: Synthetic oligonucleotide
aggaaagcccu

SEQ ID NO: 155552 - RNA, 12 nt, Artificial Sequence
  Description of Artificial Sequence: Synthetic oligonucleotide
cccagcauggcc

SEQ ID NO: 155553 - RNA, 11 nt, Artificial Sequence
  Description of Artificial Sequence: Synthetic oligonucleotide
cuucucccuga

SEQ ID NO: 155554 - RNA, 12 nt, Artificial Sequence
  Description of Artificial Sequence: Synthetic oligonucleotide
gaagaagcccuu

SEQ ID NO: 155555 - RNA, 12 nt, Artificial Sequence
  Description of Artificial Sequence: Synthetic oligonucleotide
agaagcccuuca

SEQ ID NO: 155556 - RNA, 11 nt, Artificial Sequence
  Description of Artificial Sequence: Synthetic oligonucleotide
gcccuucagcg

SEQ ID NO: 155557 - RNA, 11 nt, Artificial Sequence
  Description of Artificial Sequence: Synthetic oligonucleotide
ccuucagcggc

SEQ ID NO: 155558 - RNA, 12 nt, Artificial Sequence
  Description of Artificial Sequence: Synthetic oligonucleotide
ucagcggccagu

SEQ ID NO: 155559 - RNA, 12 nt, Artificial Sequence
  Description of Artificial Sequence: Synthetic oligonucleotide
ugaaaagcuccg

SEQ ID NO: 155560 - RNA, 11 nt, Artificial Sequence
  Description of Artificial Sequence: Synthetic oligonucleotide
aaaagcuccgg

SEQ ID NO: 155561 - RNA, 13 nt, Artificial Sequence
  Description of Artificial Sequence: Synthetic oligonucleotide
agucaacagucug

SEQ ID NO: 155562 - RNA, 13 nt, Artificial Sequence
  Description of Artificial Sequence: Synthetic oligonucleotide
cagaguucaaaag

SEQ ID NO: 155563 - RNA, 13 nt, Artificial Sequence
  Description of Artificial Sequence: Synthetic oligonucleotide
agaguucaaaagc

SEQ ID NO: 155564 - RNA, 12 nt, Artificial Sequence
  Description of Artificial Sequence: Synthetic oligonucleotide
uucaaaagcccu

SEQ ID NO: 155565 - RNA, 12 nt, Artificial Sequence
  Description of Artificial Sequence: Synthetic oligonucleotide
ucaaaagcccuu

SEQ ID NO: 155566 - RNA, 12 nt, Artificial Sequence
  Description of Artificial Sequence: Synthetic oligonucleotide
aaaagcccuuca

SEQ ID NO: 155567 - RNA, 12 nt, Artificial Sequence
  Description of Artificial Sequence: Synthetic oligonucleotide
aaagcccuucag

SEQ ID NO: 155568 - RNA, 13 nt, Artificial Sequence
  Description of Artificial Sequence: Synthetic oligonucleotide
gugaagccgcucg

SEQ ID NO: 155569 - RNA, 12 nt, Artificial Sequence
  Description of Artificial Sequence: Synthetic oligonucleotide
cacgccagucaa

SEQ ID NO: 155570 - RNA, 13 nt, Artificial Sequence
  Description of Artificial Sequence: Synthetic oligonucleotide
uucuuggugcgug

SEQ ID NO: 155571 - RNA, 14 nt, Artificial Sequence
  Description of Artificial Sequence: Synthetic oligonucleotide
auuggauucaucag

SEQ ID NO: 155572 - RNA, 13 nt, Artificial Sequence
  Description of Artificial Sequence: Synthetic oligonucleotide
uggaauaccuaag

SEQ ID NO: 155573 - RNA, 12 nt, Artificial Sequence
  Description of Artificial Sequence: Synthetic oligonucleotide
auuugaggcuca

SEQ ID NO: 155574 - RNA, 11 nt, Artificial Sequence
  Description of Artificial Sequence: Synthetic oligonucleotide
ucuacaauugg

SEQ ID NO: 155575 - RNA, 12 nt, Artificial Sequence
  Description of Artificial Sequence: Synthetic oligonucleotide
uaguuaggagcc

SEQ ID NO: 155576 - RNA, 13 nt, Artificial Sequence
  Description of Artificial Sequence: Synthetic oligonucleotide
agucaauauccac

SEQ ID NO: 155577 - RNA, 13 nt, Artificial Sequence
  Description of Artificial Sequence: Synthetic oligonucleotide
auguucagucaca

SEQ ID NO: 155578 - RNA, 12 nt, Artificial Sequence
  Description of Artificial Sequence: Synthetic oligonucleotide
acacacacauac

SEQ ID NO: 155579 - RNA, 12 nt, Artificial Sequence
  Description of Artificial Sequence: Synthetic oligonucleotide
uuccuuuugcuu

SEQ ID NO: 155580 - RNA, 16 nt, Artificial Sequence
  Description of Artificial Sequence: Synthetic oligonucleotide
uuuuaaaguaauuuuu

SEQ ID NO: 155581 - RNA, 13 nt, Artificial Sequence
  Description of Artificial Sequence: Synthetic oligonucleotide
caacagucaaugg

SEQ ID NO: 155582 - RNA, 13 nt, Artificial Sequence
  Description of Artificial Sequence: Synthetic oligonucleotide
ucgacaaaccaau

SEQ ID NO: 155583 - RNA, 12 nt, Artificial Sequence
  Description of Artificial Sequence: Synthetic oligonucleotide
acugcuaccacu

SEQ ID NO: 155584 - RNA, 13 nt, Artificial Sequence
  Description of Artificial Sequence: Synthetic oligonucleotide
gcaagcggucuua

SEQ ID NO: 155585 - RNA, 13 nt, Artificial Sequence
  Description of Artificial Sequence: Synthetic oligonucleotide
ggucuuaccggcu

SEQ ID NO: 155586 - RNA, 11 nt, Artificial Sequence
  Description of Artificial Sequence: Synthetic oligonucleotide
gauggguuacc

SEQ ID NO: 155587 - RNA, 11 nt, Artificial Sequence
  Description of Artificial Sequence: Synthetic oligonucleotide
guuaccugcga

SEQ ID NO: 155588 - RNA, 12 nt, Artificial Sequence
  Description of Artificial Sequence: Synthetic oligonucleotide
aaucuugcugag

SEQ ID NO: 155589 - RNA, 13 nt, Artificial Sequence
  Description of Artificial Sequence: Synthetic oligonucleotide
agcauaaaacagu

SEQ ID NO: 155590 - RNA, 12 nt, Artificial Sequence
  Description of Artificial Sequence: Synthetic oligonucleotide
guccuuuauccu

SEQ ID NO: 155591 - RNA, 12 nt, Artificial Sequence
  Description of Artificial Sequence: Synthetic oligonucleotide
caacgcaaguug

SEQ ID NO: 155592 - RNA, 13 nt, Artificial Sequence
  Description of Artificial Sequence: Synthetic oligonucleotide
aaacugaaaccau

SEQ ID NO: 155593 - RNA, 14 nt, Artificial Sequence
  Description of Artificial Sequence: Synthetic oligonucleotide
acuuuguuaaauau

SEQ ID NO: 155594 - RNA, 14 nt, Artificial Sequence
  Description of Artificial Sequence: Synthetic oligonucleotide
guauauuaaaaguu

SEQ ID NO: 155595 - RNA, 13 nt, Artificial Sequence
  Description of Artificial Sequence: Synthetic oligonucleotide
guuuugacuuaac

SEQ ID NO: 155596 - RNA, 13 nt, Artificial Sequence
  Description of Artificial Sequence: Synthetic oligonucleotide
gcaaacucagcac

SEQ ID NO: 155597 - RNA, 11 nt, Artificial Sequence
  Description of Artificial Sequence: Synthetic oligonucleotide
ugcugaccuca

SEQ ID NO: 155598 - RNA, 14 nt, Artificial Sequence
  Description of Artificial Sequence: Synthetic oligonucleotide
uuuauucagaucgc

SEQ ID NO: 155599 - RNA, 13 nt, Artificial Sequence
  Description of Artificial Sequence: Synthetic oligonucleotide
aggguucugggau

SEQ ID NO: 155600 - RNA, 15 nt, Artificial Sequence
  Description of Artificial Sequence: Synthetic oligonucleotide
auauuggaaauuaug

SEQ ID NO: 155601 - RNA, 13 nt, Artificial Sequence
  Description of Artificial Sequence: Synthetic oligonucleotide
auggaagcacuag

SEQ ID NO: 155602 - RNA, 13 nt, Artificial Sequence
  Description of Artificial Sequence: Synthetic oligonucleotide
guuuuuaugugga

SEQ ID NO: 155603 - RNA, 12 nt, Artificial Sequence
  Description of Artificial Sequence: Synthetic oligonucleotide
ggaauugguaga

SEQ ID NO: 155604 - RNA, 13 nt, Artificial Sequence
  Description of Artificial Sequence: Synthetic oligonucleotide
uuagacuuggaga

SEQ ID NO: 155605 - RNA, 13 nt, Artificial Sequence
  Description of Artificial Sequence: Synthetic oligonucleotide
uuacaguauucca

SEQ ID NO: 155606 - RNA, 15 nt, Artificial Sequence
  Description of Artificial Sequence: Synthetic oligonucleotide
ccacugaugaauuaa

SEQ ID NO: 155607 - RNA, 12 nt, Artificial Sequence
  Description of Artificial Sequence: Synthetic oligonucleotide
ccacaucaucac

SEQ ID NO: 155608 - RNA, 13 nt, Artificial Sequence
  Description of Artificial Sequence: Synthetic oligonucleotide
cucaccaaacaga

SEQ ID NO: 155609 - RNA, 12 nt, Artificial Sequence
  Description of Artificial Sequence: Synthetic oligonucleotide
ggaacaugaugg

SEQ ID NO: 155610 - RNA, 12 nt, Artificial Sequence
  Description of Artificial Sequence: Synthetic oligonucleotide
cauguagacugc

SEQ ID NO: 155611 - RNA, 13 nt, Artificial Sequence
  Description of Artificial Sequence: Synthetic oligonucleotide
ggaucuauuuaug

SEQ ID NO: 155612 - RNA, 12 nt, Artificial Sequence
  Description of Artificial Sequence: Synthetic oligonucleotide
gcacuauuauca

SEQ ID NO: 155613 - RNA, 11 nt, Artificial Sequence
  Description of Artificial Sequence: Synthetic oligonucleotide
aucaguucugc

SEQ ID NO: 155614 - RNA, 13 nt, Artificial Sequence
  Description of Artificial Sequence: Synthetic oligonucleotide
agauuaaaccuac

SEQ ID NO: 155615 - RNA, 13 nt, Artificial Sequence
  Description of Artificial Sequence: Synthetic oligonucleotide
auaaaauccuucu

SEQ ID NO: 155616 - RNA, 12 nt, Artificial Sequence
  Description of Artificial Sequence: Synthetic oligonucleotide
aaugcuguagac

SEQ ID NO: 155617 - RNA, 13 nt, Artificial Sequence
  Description of Artificial Sequence: Synthetic oligonucleotide
uugauaggaauag

SEQ ID NO: 155618 - RNA, 11 nt, Artificial Sequence
  Description of Artificial Sequence: Synthetic oligonucleotide
aauggcccuga

SEQ ID NO: 155619 - RNA, 11 nt, Artificial Sequence
  Description of Artificial Sequence: Synthetic oligonucleotide
uuccucaagca

SEQ ID NO: 155620 - RNA, 10 nt, Artificial Sequence
  Description of Artificial Sequence: Synthetic oligonucleotide
guucagccca

SEQ ID NO: 155621 - RNA, 11 nt, Artificial Sequence
  Description of Artificial Sequence: Synthetic oligonucleotide
gcugcugaacc

SEQ ID NO: 155622 - RNA, 12 nt, Artificial Sequence
  Description of Artificial Sequence: Synthetic oligonucleotide
aaguucucuuca

SEQ ID NO: 155623 - RNA, 11 nt, Artificial Sequence
  Description of Artificial Sequence: Synthetic oligonucleotide
ccagccuagag

SEQ ID NO: 155624 - RNA, 13 nt, Artificial Sequence
  Description of Artificial Sequence: Synthetic oligonucleotide
cucugugaagugu

SEQ ID NO: 155625 - RNA, 14 nt, Artificial Sequence
  Description of Artificial Sequence: Synthetic oligonucleotide
ugagaaaauuucaa

SEQ ID NO: 155626 - RNA, 11 nt, Artificial Sequence
  Description of Artificial Sequence: Synthetic oligonucleotide
aauccuccuga

SEQ ID NO: 155627 - RNA, 12 nt, Artificial Sequence
  Description of Artificial Sequence: Synthetic oligonucleotide
gugacaucauau

SEQ ID NO: 155628 - RNA, 13 nt, Artificial Sequence
  Description of Artificial Sequence: Synthetic oligonucleotide
aaucuucaucaua

SEQ ID NO: 155629 - RNA, 13 nt, Artificial Sequence
  Description of Artificial Sequence: Synthetic oligonucleotide
gacuagcuauuaa

SEQ ID NO: 155630 - RNA, 14 nt, Artificial Sequence
  Description of Artificial Sequence: Synthetic oligonucleotide
ucucuacuaaaaau

SEQ ID NO: 155631 - RNA, 12 nt, Artificial Sequence
  Description of Artificial Sequence: Synthetic oligonucleotide
ucuaucucgccu

SEQ ID NO: 155632 - RNA, 13 nt, Artificial Sequence
  Description of Artificial Sequence: Synthetic oligonucleotide
cuucgguccaguu

SEQ ID NO: 155633 - RNA, 11 nt, Artificial Sequence
  Description of Artificial Sequence: Synthetic oligonucleotide
gauguagccgc

SEQ ID NO: 155634 - RNA, 12 nt, Artificial Sequence
  Description of Artificial Sequence: Synthetic oligonucleotide
ugaggagacuug

SEQ ID NO: 155635 - RNA, 12 nt, Artificial Sequence
  Description of Artificial Sequence: Synthetic oligonucleotide
gaguagugagga

SEQ ID NO: 155636 - RNA, 14 nt, Artificial Sequence
  Description of Artificial Sequence: Synthetic oligonucleotide
cagaugaguacaaa

SEQ ID NO: 155637 - RNA, 13 nt, Artificial Sequence
  Description of Artificial Sequence: Synthetic oligonucleotide
guuguuaaugggc

SEQ ID NO: 155638 - RNA, 13 nt, Artificial Sequence
  Description of Artificial Sequence: Synthetic oligonucleotide
uuuuuaauuuauu

SEQ ID NO: 155639 - RNA, 12 nt, Artificial Sequence
  Description of Artificial Sequence: Synthetic oligonucleotide
uauuuaaauaug

SEQ ID NO: 155640 - RNA, 13 nt, Artificial Sequence
  Description of Artificial Sequence: Synthetic oligonucleotide
uauccuuuguuuc

SEQ ID NO: 155641 - RNA, 14 nt, Artificial Sequence
  Description of Artificial Sequence: Synthetic oligonucleotide
cgucuaaguguuug

SEQ ID NO: 155642 - RNA, 12 nt, Artificial Sequence
  Description of Artificial Sequence: Synthetic oligonucleotide
accugugacaaa

SEQ ID NO: 155643 - RNA, 13 nt, Artificial Sequence
  Description of Artificial Sequence: Synthetic oligonucleotide
ccaggcugaauua

SEQ ID NO: 155644 - RNA, 14 nt, Artificial Sequence
  Description of Artificial Sequence: Synthetic oligonucleotide
gucauucuuacaau

SEQ ID NO: 155645 - RNA, 15 nt, Artificial Sequence
  Description of Artificial Sequence: Synthetic oligonucleotide
ucauucuuacaauug

SEQ ID NO: 155646 - RNA, 12 nt, Artificial Sequence
  Description of Artificial Sequence: Synthetic oligonucleotide
cagagaguguac

SEQ ID NO: 155647 - RNA, 12 nt, Artificial Sequence
  Description of Artificial Sequence: Synthetic oligonucleotide
agaacucagcag

SEQ ID NO: 155648 - RNA, 13 nt, Artificial Sequence
  Description of Artificial Sequence: Synthetic oligonucleotide
uuuauuuucagua

SEQ ID NO: 155649 - RNA, 12 nt, Artificial Sequence
  Description of Artificial Sequence: Synthetic oligonucleotide
ucuuaaauggaa

SEQ ID NO: 155650 - RNA, 13 nt, Artificial Sequence
  Description of Artificial Sequence: Synthetic oligonucleotide
ugccuaaaauugu

SEQ ID NO: 155651 - RNA, 12 nt, Artificial Sequence
  Description of Artificial Sequence: Synthetic oligonucleotide
agacugugagcu

SEQ ID NO: 155652 - RNA, 14 nt, Artificial Sequence
  Description of Artificial Sequence: Synthetic oligonucleotide
ugcuuuuuauuaau

SEQ ID NO: 155653 - RNA, 13 nt, Artificial Sequence
  Description of Artificial Sequence: Synthetic oligonucleotide
cucuucuuacauu

SEQ ID NO: 155654 - RNA, 15 nt, Artificial Sequence
  Description of Artificial Sequence: Synthetic oligonucleotide
cauuuguaaaaaugu

SEQ ID NO: 155655 - RNA, 15 nt, Artificial Sequence
  Description of Artificial Sequence: Synthetic oligonucleotide
aucuuaauucauauu

SEQ ID NO: 155656 - RNA, 13 nt, Artificial Sequence
  Description of Artificial Sequence: Synthetic oligonucleotide
gaacuaaucauga

SEQ ID NO: 155657 - RNA, 12 nt, Artificial Sequence
  Description of Artificial Sequence: Synthetic oligonucleotide
ucugcucuuggg

SEQ ID NO: 155658 - RNA, 13 nt, Artificial Sequence
  Description of Artificial Sequence: Synthetic oligonucleotide
caguagcuuugag

SEQ ID NO: 155659 - RNA, 14 nt, Artificial Sequence
  Description of Artificial Sequence: Synthetic oligonucleotide
cacguaauauuuca

SEQ ID NO: 155660 - RNA, 13 nt, Artificial Sequence
  Description of Artificial Sequence: Synthetic oligonucleotide
uauucucuucacu

SEQ ID NO: 155661 - RNA, 14 nt, Artificial Sequence
  Description of Artificial Sequence: Synthetic oligonucleotide
cuaaugcuaagaaa

SEQ ID NO: 155662 - RNA, 12 nt, Artificial Sequence
  Description of Artificial Sequence: Synthetic oligonucleotide
gcugaaaaucaa

SEQ ID NO: 155663 - RNA, 14 nt, Artificial Sequence
  Description of Artificial Sequence: Synthetic oligonucleotide
aauaugauuacuuu

SEQ ID NO: 155664 - RNA, 14 nt, Artificial Sequence
  Description of Artificial Sequence: Synthetic oligonucleotide
cauuuuguucuaca

SEQ ID NO: 155665 - RNA, 12 nt, Artificial Sequence
  Description of Artificial Sequence: Synthetic oligonucleotide
cccgggacucuc

SEQ ID NO: 155666 - RNA, 14 nt, Artificial Sequence
  Description of Artificial Sequence: Synthetic oligonucleotide
ccuuuaaaguaaag

SEQ ID NO: 155667 - RNA, 13 nt, Artificial Sequence
  Description of Artificial Sequence: Synthetic oligonucleotide
ucuggaagccugg

SEQ ID NO: 155668 - RNA, 14 nt, Artificial Sequence
  Description of Artificial Sequence: Synthetic oligonucleotide
aaaacaaaagagag

SEQ ID NO: 155669 - RNA, 13 nt, Artificial Sequence
  Description of Artificial Sequence: Synthetic oligonucleotide
aucaguuaugccg

SEQ ID NO: 155670 - RNA, 13 nt, Artificial Sequence
  Description of Artificial Sequence: Synthetic oligonucleotide
uaaaagaagucca

SEQ ID NO: 155671 - RNA, 11 nt, Artificial Sequence
  Description of Artificial Sequence: Synthetic oligonucleotide
aggugagguua

SEQ ID NO: 155672 - RNA, 11 nt, Artificial Sequence
  Description of Artificial Sequence: Synthetic oligonucleotide
gggaagaggac

SEQ ID NO: 155673 - RNA, 13 nt, Artificial Sequence
  Description of Artificial Sequence: Synthetic oligonucleotide
aagcaaguauugu

SEQ ID NO: 155674 - RNA, 12 nt, Artificial Sequence
  Description of Artificial Sequence: Synthetic oligonucleotide
auuguagcacuc

SEQ ID NO: 155675 - RNA, 14 nt, Artificial Sequence
  Description of Artificial Sequence: Synthetic oligonucleotide
acaaaaccacaaau

SEQ ID NO: 155676 - RNA, 12 nt, Artificial Sequence
  Description of Artificial Sequence: Synthetic oligonucleotide
uaagcccauaca

SEQ ID NO: 155677 - RNA, 11 nt, Artificial Sequence
  Description of Artificial Sequence: Synthetic oligonucleotide
agcccauacag

SEQ ID NO: 155678 - RNA, 12 nt, Artificial Sequence
  Description of Artificial Sequence: Synthetic oligonucleotide
cagaaaccuucc

SEQ ID NO: 155679 - RNA, 10 nt, Artificial Sequence
  Description of Artificial Sequence: Synthetic oligonucleotide
guauaccuac

SEQ ID NO: 155680 - RNA, 13 nt, Artificial Sequence
  Description of Artificial Sequence: Synthetic oligonucleotide
gccaguuuucgga

SEQ ID NO: 155681 - RNA, 9 nt, Artificial Sequence
  Description of Artificial Sequence: Synthetic oligonucleotide
ggaacaggg

SEQ ID NO: 155682 - RNA, 13 nt, Artificial Sequence
  Description of Artificial Sequence: Synthetic oligonucleotide
uuaacuuuccagu

SEQ ID NO: 155683 - RNA, 14 nt, Artificial Sequence
  Description of Artificial Sequence: Synthetic oligonucleotide
aaaguuugguuuug

SEQ ID NO: 155684 - RNA, 12 nt, Artificial Sequence
  Description of Artificial Sequence: Synthetic oligonucleotide
cuucccacugua

SEQ ID NO: 155685 - RNA, 13 nt, Artificial Sequence
  Description of Artificial Sequence: Synthetic oligonucleotide
ugauaccauauga

SEQ ID NO: 155686 - RNA, 11 nt, Artificial Sequence
  Description of Artificial Sequence: Synthetic oligonucleotide
aacaugggcug

SEQ ID NO: 155687 - RNA, 13 nt, Artificial Sequence
  Description of Artificial Sequence: Synthetic oligonucleotide
caacuuuuucaua

SEQ ID NO: 155688 - RNA, 12 nt, Artificial Sequence
  Description of Artificial Sequence: Synthetic oligonucleotide
caugaggccgga

SEQ ID NO: 155689 - RNA, 11 nt, Artificial Sequence
  Description of Artificial Sequence: Synthetic oligonucleotide
acugcauuugu

SEQ ID NO: 155690 - RNA, 13 nt, Artificial Sequence
  Description of Artificial Sequence: Synthetic oligonucleotide
aauguuuacuacc

SEQ ID NO: 155691 - RNA, 15 nt, Artificial Sequence
  Description of Artificial Sequence: Synthetic oligonucleotide
aauuuuuugaugaaa

SEQ ID NO: 155692 - RNA, 14 nt, Artificial Sequence
  Description of Artificial Sequence: Synthetic oligonucleotide
cagugugugaauuu

SEQ ID NO: 155693 - RNA, 13 nt, Artificial Sequence
  Description of Artificial Sequence: Synthetic oligonucleotide
gagcaauguaugu

SEQ ID NO: 155694 - RNA, 14 nt, Artificial Sequence
  Description of Artificial Sequence: Synthetic oligonucleotide
aaagcacauauaua

SEQ ID NO: 155695 - RNA, 14 nt, Artificial Sequence
  Description of Artificial Sequence: Synthetic oligonucleotide
guaauaguuucucc

SEQ ID NO: 155696 - RNA, 13 nt, Artificial Sequence
  Description of Artificial Sequence: Synthetic oligonucleotide
aguuucuccaaau

SEQ ID NO: 155697 - RNA, 13 nt, Artificial Sequence
  Description of Artificial Sequence: Synthetic oligonucleotide
uacuuccuagaaa

SEQ ID NO: 155698 - RNA, 13 nt, Artificial Sequence
  Description of Artificial Sequence: Synthetic oligonucleotide
uacaccauauaug

SEQ ID NO: 155699 - RNA, 14 nt, Artificial Sequence
  Description of Artificial Sequence: Synthetic oligonucleotide
auauaugaauggag

SEQ ID NO: 155700 - RNA, 13 nt, Artificial Sequence
  Description of Artificial Sequence: Synthetic oligonucleotide
acgagaagaagau

SEQ ID NO: 155701 - RNA, 13 nt, Artificial Sequence
  Description of Artificial Sequence: Synthetic oligonucleotide
ucauuuacaggga

SEQ ID NO: 155702 - RNA, 13 nt, Artificial Sequence
  Description of Artificial Sequence: Synthetic oligonucleotide
cauuuacagggac

SEQ ID NO: 155703 - RNA, 10 nt, Artificial Sequence
  Description of Artificial Sequence: Synthetic oligonucleotide
agggaccuga

SEQ ID NO: 155704 - RNA, 14 nt, Artificial Sequence
  Description of Artificial Sequence: Synthetic oligonucleotide
uguuugacugcauc

SEQ ID NO: 155705 - RNA, 13 nt, Artificial Sequence
  Description of Artificial Sequence: Synthetic oligonucleotide
uuugacugcaucg

SEQ ID NO: 155706 - RNA, 12 nt, Artificial Sequence
  Description of Artificial Sequence: Synthetic oligonucleotide
gaguucacaggg

SEQ ID NO: 155707 - RNA, 13 nt, Artificial Sequence
  Description of Artificial Sequence: Synthetic oligonucleotide
ggcaccucugucc

SEQ ID NO: 155708 - RNA, 15 nt, Artificial Sequence
  Description of Artificial Sequence: Synthetic oligonucleotide
gguuugucuuuuuaa

SEQ ID NO: 155709 - RNA, 14 nt, Artificial Sequence
  Description of Artificial Sequence: Synthetic oligonucleotide
uuugucuuuuuaag

SEQ ID NO: 155710 - RNA, 13 nt, Artificial Sequence
  Description of Artificial Sequence: Synthetic oligonucleotide
ccuaaagguuguc

SEQ ID NO: 155711 - RNA, 12 nt, Artificial Sequence
  Description of Artificial Sequence: Synthetic oligonucleotide
aagguugucgac

SEQ ID NO: 155712 - RNA, 13 nt, Artificial Sequence
  Description of Artificial Sequence: Synthetic oligonucleotide
accuggcaauugu

SEQ ID NO: 155713 - RNA, 12 nt, Artificial Sequence
  Description of Artificial Sequence: Synthetic oligonucleotide
aguggugcgagg

SEQ ID NO: 155714 - RNA, 13 nt, Artificial Sequence
  Description of Artificial Sequence: Synthetic oligonucleotide
agagacaugaaau

SEQ ID NO: 155715 - RNA, 13 nt, Artificial Sequence
  Description of Artificial Sequence: Synthetic oligonucleotide
auauauuucucca

SEQ ID NO: 155716 - RNA, 10 nt, Artificial Sequence
  Description of Artificial Sequence: Synthetic oligonucleotide
caugaaggcu

SEQ ID NO: 155717 - RNA, 11 nt, Artificial Sequence
  Description of Artificial Sequence: Synthetic oligonucleotide
gcuggaguggu

SEQ ID NO: 155718 - RNA, 11 nt, Artificial Sequence
  Description of Artificial Sequence: Synthetic oligonucleotide
aggaagagagg

SEQ ID NO: 155719 - RNA, 12 nt, Artificial Sequence
  Description of Artificial Sequence: Synthetic oligonucleotide
cuugcaucgggc

SEQ ID NO: 155720 - RNA, 13 nt, Artificial Sequence
  Description of Artificial Sequence: Synthetic oligonucleotide
auauccuacugug

SEQ ID NO: 155721 - RNA, 13 nt, Artificial Sequence
  Description of Artificial Sequence: Synthetic oligonucleotide
uccuacuguguaa

SEQ ID NO: 155722 - RNA, 12 nt, Artificial Sequence
  Description of Artificial Sequence: Synthetic oligonucleotide
ccuuguagugua

SEQ ID NO: 155723 - RNA, 13 nt, Artificial Sequence
  Description of Artificial Sequence: Synthetic oligonucleotide
ucuuuguugauug

SEQ ID NO: 155724 - RNA, 14 nt, Artificial Sequence
  Description of Artificial Sequence: Synthetic oligonucleotide
uuuguugauugaaa

SEQ ID NO: 155725 - RNA, 15 nt, Artificial Sequence
  Description of Artificial Sequence: Synthetic oligonucleotide
uucuuuuucuuccau

SEQ ID NO: 155726 - RNA, 13 nt, Artificial Sequence
  Description of Artificial Sequence: Synthetic oligonucleotide
aaucuuccuucua

SEQ ID NO: 155727 - RNA, 13 nt, Artificial Sequence
  Description of Artificial Sequence: Synthetic oligonucleotide
uugaaugcuucau

SEQ ID NO: 155728 - RNA, 13 nt, Artificial Sequence
  Description of Artificial Sequence: Synthetic oligonucleotide
ugaaugcuucaug

SEQ ID NO: 155729 - RNA, 13 nt, Artificial Sequence
  Description of Artificial Sequence: Synthetic oligonucleotide
aauucuacuuuga

SEQ ID NO: 155730 - RNA, 13 nt, Artificial Sequence
  Description of Artificial Sequence: Synthetic oligonucleotide
agcaacuacagac

SEQ ID NO: 155731 - RNA, 13 nt, Artificial Sequence
  Description of Artificial Sequence: Synthetic oligonucleotide
gaccaaggucaac

SEQ ID NO: 155732 - RNA, 13 nt, Artificial Sequence
  Description of Artificial Sequence: Synthetic oligonucleotide
cgacuaucucgac

SEQ ID NO: 155733 - RNA, 13 nt, Artificial Sequence
  Description of Artificial Sequence: Synthetic oligonucleotide
aaccuucccaaac

SEQ ID NO: 155734 - RNA, 14 nt, Artificial Sequence
  Description of Artificial Sequence: Synthetic oligonucleotide
ccaagcuuagaacu

SEQ ID NO: 155735 - RNA, 15 nt, Artificial Sequence
  Description of Artificial Sequence: Synthetic oligonucleotide
agcuuagaacuuuaa

SEQ ID NO: 155736 - RNA, 11 nt, Artificial Sequence
  Description of Artificial Sequence: Synthetic oligonucleotide
aagaccaccac

SEQ ID NO: 155737 - RNA, 14 nt, Artificial Sequence
  Description of Artificial Sequence: Synthetic oligonucleotide
gcgagaaauaaagu

SEQ ID NO: 155738 - RNA, 14 nt, Artificial Sequence
  Description of Artificial Sequence: Synthetic oligonucleotide
cgagaaauaaaguu

SEQ ID NO: 155739 - RNA, 12 nt, Artificial Sequence
  Description of Artificial Sequence: Synthetic oligonucleotide
aggaaaugaucc

SEQ ID NO: 155740 - RNA, 13 nt, Artificial Sequence
  Description of Artificial Sequence: Synthetic oligonucleotide
gaagaaaugaaac

SEQ ID NO: 155741 - RNA, 13 nt, Artificial Sequence
  Description of Artificial Sequence: Synthetic oligonucleotide
guuuccauccucc

SEQ ID NO: 155742 - RNA, 15 nt, Artificial Sequence
  Description of Artificial Sequence: Synthetic oligonucleotide
acugaaaaucuuuga

SEQ ID NO: 155743 - RNA, 11 nt, Artificial Sequence
  Description of Artificial Sequence: Synthetic oligonucleotide
ugccguucagg

SEQ ID NO: 155744 - RNA, 13 nt, Artificial Sequence
  Description of Artificial Sequence: Synthetic oligonucleotide
caggguccagaag

SEQ ID NO: 155745 - RNA, 13 nt, Artificial Sequence
  Description of Artificial Sequence: Synthetic oligonucleotide
ucaagacugcuug

SEQ ID NO: 155746 - RNA, 13 nt, Artificial Sequence
  Description of Artificial Sequence: Synthetic oligonucleotide
uccaugucuuugg

SEQ ID NO: 155747 - RNA, 11 nt, Artificial Sequence
  Description of Artificial Sequence: Synthetic oligonucleotide
gccugaaacac

SEQ ID NO: 155748 - RNA, 12 nt, Artificial Sequence
  Description of Artificial Sequence: Synthetic oligonucleotide
ucucuguaccuc

SEQ ID NO: 155749 - RNA, 12 nt, Artificial Sequence
  Description of Artificial Sequence: Synthetic oligonucleotide
agcaagacaaga

SEQ ID NO: 155750 - RNA, 13 nt, Artificial Sequence
  Description of Artificial Sequence: Synthetic oligonucleotide
gcaagacaagaaa

SEQ ID NO: 155751 - RNA, 12 nt, Artificial Sequence
  Description of Artificial Sequence: Synthetic oligonucleotide
uguacaagaucc

SEQ ID NO: 155752 - RNA, 12 nt, Artificial Sequence
  Description of Artificial Sequence: Synthetic oligonucleotide
cguacuugcaga

SEQ ID NO: 155753 - RNA, 13 nt, Artificial Sequence
  Description of Artificial Sequence: Synthetic oligonucleotide
cgaucgauacaga

SEQ ID NO: 155754 - RNA, 13 nt, Artificial Sequence
  Description of Artificial Sequence: Synthetic oligonucleotide
uauaaaaauaaau

SEQ ID NO: 155755 - RNA, 13 nt, Artificial Sequence
  Description of Artificial Sequence: Synthetic oligonucleotide
uaaaaauaaauau

SEQ ID NO: 155756 - RNA, 13 nt, Artificial Sequence
  Description of Artificial Sequence: Synthetic oligonucleotide
uuugacugcugug

SEQ ID NO: 155757 - RNA, 13 nt, Artificial Sequence
  Description of Artificial Sequence: Synthetic oligonucleotide
ggagaugagagac

SEQ ID NO: 155758 - RNA, 10 nt, Artificial Sequence
  Description of Artificial Sequence: Synthetic oligonucleotide
ucccacuugg

SEQ ID NO: 155759 - RNA, 10 nt, Artificial Sequence
  Description of Artificial Sequence: Synthetic oligonucleotide
guucacggcc

SEQ ID NO: 155760 - RNA, 12 nt, Artificial Sequence
  Description of Artificial Sequence: Synthetic oligonucleotide
accaucacacca

SEQ ID NO: 155761 - RNA, 10 nt, Artificial Sequence
  Description of Artificial Sequence: Synthetic oligonucleotide
cugcggguuu

SEQ ID NO: 155762 - RNA, 9 nt, Artificial Sequence
  Description of Artificial Sequence: Synthetic oligonucleotide
uccaguuug

SEQ ID NO: 155763 - RNA, 12 nt, Artificial Sequence
  Description of Artificial Sequence: Synthetic oligonucleotide
uuaaggacuucu

SEQ ID NO: 155764 - RNA, 12 nt, Artificial Sequence
  Description of Artificial Sequence: Synthetic oligonucleotide
agugggacagag

SEQ ID NO: 155765 - RNA, 13 nt, Artificial Sequence
  Description of Artificial Sequence: Synthetic oligonucleotide
auuuguuauugug

SEQ ID NO: 155766 - RNA, 12 nt, Artificial Sequence
  Description of Artificial Sequence: Synthetic oligonucleotide
ucaaaugcauuu

SEQ ID NO: 155767 - RNA, 9 nt, Artificial Sequence
  Description of Artificial Sequence: Synthetic oligonucleotide
aggaaagcc

SEQ ID NO: 155768 - RNA, 10 nt, Artificial Sequence
  Description of Artificial Sequence: Synthetic oligonucleotide
ggaaagcccu

SEQ ID NO: 155769 - RNA, 11 nt, Artificial Sequence
  Description of Artificial Sequence: Synthetic oligonucleotide
ccagcauggcc

SEQ ID NO: 155770 - RNA, 10 nt, Artificial Sequence
  Description of Artificial Sequence: Synthetic oligonucleotide
uucucccuga

SEQ ID NO: 155771 - RNA, 11 nt, Artificial Sequence
  Description of Artificial Sequence: Synthetic oligonucleotide
aagaagcccuu

SEQ ID NO: 155772 - RNA, 11 nt, Artificial Sequence
  Description of Artificial Sequence: Synthetic oligonucleotide
gaagcccuuca

SEQ ID NO: 155773 - RNA, 10 nt, Artificial Sequence
  Description of Artificial Sequence: Synthetic oligonucleotide
cccuucagcg

SEQ ID NO: 155774 - RNA, 10 nt, Artificial Sequence
  Description of Artificial Sequence: Synthetic oligonucleotide
cuucagcggc

SEQ ID NO: 155775 - RNA, 11 nt, Artificial Sequence
  Description of Artificial Sequence: Synthetic oligonucleotide
cagcggccagu

SEQ ID NO: 155776 - RNA, 11 nt, Artificial Sequence
  Description of Artificial Sequence: Synthetic oligonucleotide
gaaaagcuccg

SEQ ID NO: 155777 - RNA, 10 nt, Artificial Sequence
  Description of Artificial Sequence: Synthetic oligonucleotide
aaagcuccgg

SEQ ID NO: 155778 - RNA, 12 nt, Artificial Sequence
  Description of Artificial Sequence: Synthetic oligonucleotide
gucaacagucug

SEQ ID NO: 155779 - RNA, 12 nt, Artificial Sequence
  Description of Artificial Sequence: Synthetic oligonucleotide
agaguucaaaag

SEQ ID NO: 155780 - RNA, 12 nt, Artificial Sequence
  Description of Artificial Sequence: Synthetic oligonucleotide
gaguucaaaagc

SEQ ID NO: 155781 - RNA, 11 nt, Artificial Sequence
  Description of Artificial Sequence: Synthetic oligonucleotide
ucaaaagcccu

SEQ ID NO: 155782 - RNA, 11 nt, Artificial Sequence
  Description of Artificial Sequence: Synthetic oligonucleotide
caaaagcccuu

SEQ ID NO: 155783 - RNA, 11 nt, Artificial Sequence
  Description of Artificial Sequence: Synthetic oligonucleotide
aaagcccuuca

SEQ ID NO: 155784 - RNA, 11 nt, Artificial Sequence
  Description of Artificial Sequence: Synthetic oligonucleotide
aagcccuucag

SEQ ID NO: 155785 - RNA, 12 nt, Artificial Sequence
  Description of Artificial Sequence: Synthetic oligonucleotide
ugaagccgcucg

SEQ ID NO: 155786 - RNA, 11 nt, Artificial Sequence
  Description of Artificial Sequence: Synthetic oligonucleotide
acgccagucaa

SEQ ID NO: 155787 - RNA, 12 nt, Artificial Sequence
  Description of Artificial Sequence: Synthetic oligonucleotide
ucuuggugcgug

SEQ ID NO: 155788 - RNA, 13 nt, Artificial Sequence
  Description of Artificial Sequence: Synthetic oligonucleotide
uuggauucaucag

SEQ ID NO: 155789 - RNA, 12 nt, Artificial Sequence
  Description of Artificial Sequence: Synthetic oligonucleotide
ggaauaccuaag

SEQ ID NO: 155790 - RNA, 11 nt, Artificial Sequence
  Description of Artificial Sequence: Synthetic oligonucleotide
uuugaggcuca

SEQ ID NO: 155791 - RNA, 10 nt, Artificial Sequence
  Description of Artificial Sequence: Synthetic oligonucleotide
cuacaauugg

SEQ ID NO: 155792 - RNA, 11 nt, Artificial Sequence
  Description of Artificial Sequence: Synthetic oligonucleotide
aguuaggagcc

SEQ ID NO: 155793 - RNA, 12 nt, Artificial Sequence
  Description of Artificial Sequence: Synthetic oligonucleotide
gucaauauccac

SEQ ID NO: 155794 - RNA, 12 nt, Artificial Sequence
  Description of Artificial Sequence: Synthetic oligonucleotide
uguucagucaca

SEQ ID NO: 155795 - RNA, 11 nt, Artificial Sequence
  Description of Artificial Sequence: Synthetic oligonucleotide
cacacacauac

SEQ ID NO: 155796 - RNA, 11 nt, Artificial Sequence
  Description of Artificial Sequence: Synthetic oligonucleotide
uccuuuugcuu

SEQ ID NO: 155797 - RNA, 15 nt, Artificial Sequence
  Description of Artificial Sequence: Synthetic oligonucleotide
uuuaaaguaauuuuu

SEQ ID NO: 155798 - RNA, 12 nt, Artificial Sequence
  Description of Artificial Sequence: Synthetic oligonucleotide
aacagucaaugg

SEQ ID NO: 155799 - RNA, 12 nt, Artificial Sequence
  Description of Artificial Sequence: Synthetic oligonucleotide
cgacaaaccaau

SEQ ID NO: 155800 - RNA, 11 nt, Artificial Sequence
  Description of Artificial Sequence: Synthetic oligonucleotide
cugcuaccacu

SEQ ID NO: 155801 - RNA, 12 nt, Artificial Sequence
  Description of Artificial Sequence: Synthetic oligonucleotide
caagcggucuua

SEQ ID NO: 155802 - RNA, 12 nt, Artificial Sequence
  Description of Artificial Sequence: Synthetic oligonucleotide
gucuuaccggcu

SEQ ID NO: 155803 - RNA, 10 nt, Artificial Sequence
  Description of Artificial Sequence: Synthetic oligonucleotide
auggguuacc

SEQ ID NO: 155804 - RNA, 10 nt, Artificial Sequence
  Description of Artificial Sequence: Synthetic oligonucleotide
uuaccugcga

SEQ ID NO: 155805 - RNA, 11 nt, Artificial Sequence
  Description of Artificial Sequence: Synthetic oligonucleotide
aucuugcugag

SEQ ID NO: 155806 - RNA, 12 nt, Artificial Sequence
  Description of Artificial Sequence: Synthetic oligonucleotide
gcauaaaacagu

SEQ ID NO: 155807 - RNA, 11 nt, Artificial Sequence
  Description of Artificial Sequence: Synthetic oligonucleotide
uccuuuauccu

SEQ ID NO: 155808 - RNA, 11 nt, Artificial Sequence
  Description of Artificial Sequence: Synthetic oligonucleotide
aacgcaaguug

SEQ ID NO: 155809 - RNA, 12 nt, Artificial Sequence
  Description of Artificial Sequence: Synthetic oligonucleotide
aacugaaaccau

SEQ ID NO: 155810 - RNA, 13 nt, Artificial Sequence
  Description of Artificial Sequence: Synthetic oligonucleotide
cuuuguuaaauau

SEQ ID NO: 155811 - RNA, 13 nt, Artificial Sequence
  Description of Artificial Sequence: Synthetic oligonucleotide
uauauuaaaaguu

SEQ ID NO: 155812 - RNA, 12 nt, Artificial Sequence
  Description of Artificial Sequence: Synthetic oligonucleotide
uuuugacuuaac

SEQ ID NO: 155813 - RNA, 12 nt, Artificial Sequence
  Description of Artificial Sequence: Synthetic oligonucleotide
caaacucagcac

SEQ ID NO: 155814 - RNA, 10 nt, Artificial Sequence
  Description of Artificial Sequence: Synthetic oligonucleotide
gcugaccuca

SEQ ID NO: 155815 - RNA, 13 nt, Artificial Sequence
  Description of Artificial Sequence: Synthetic oligonucleotide
uuauucagaucgc

SEQ ID NO: 155816 - RNA, 12 nt, Artificial Sequence
  Description of Artificial Sequence: Synthetic oligonucleotide
ggguucugggau

SEQ ID NO: 155817 - RNA, 14 nt, Artificial Sequence
  Description of Artificial Sequence: Synthetic oligonucleotide
uauuggaaauuaug

SEQ ID NO: 155818 - RNA, 12 nt, Artificial Sequence
  Description of Artificial Sequence: Synthetic oligonucleotide
uggaagcacuag

SEQ ID NO: 155819 - RNA, 12 nt, Artificial Sequence
  Description of Artificial Sequence: Synthetic oligonucleotide
uuuuuaugugga

SEQ ID NO: 155820 - RNA, 11 nt, Artificial Sequence
  Description of Artificial Sequence: Synthetic oligonucleotide
gaauugguaga

SEQ ID NO: 155821 - RNA, 12 nt, Artificial Sequence
  Description of Artificial Sequence: Synthetic oligonucleotide
uagacuuggaga

SEQ ID NO: 155822 - RNA, 12 nt, Artificial Sequence
  Description of Artificial Sequence: Synthetic oligonucleotide
uacaguauucca

SEQ ID NO: 155823 - RNA, 14 nt, Artificial Sequence
  Description of Artificial Sequence: Synthetic oligonucleotide
cacugaugaauuaa

SEQ ID NO: 155824 - RNA, 11 nt, Artificial Sequence
  Description of Artificial Sequence: Synthetic oligonucleotide
cacaucaucac

SEQ ID NO: 155825 - RNA, 12 nt, Artificial Sequence
  Description of Artificial Sequence: Synthetic oligonucleotide
ucaccaaacaga

SEQ ID NO: 155826 - RNA, 11 nt, Artificial Sequence
  Description of Artificial Sequence: Synthetic oligonucleotide
gaacaugaugg

SEQ ID NO: 155827 - RNA, 11 nt, Artificial Sequence
  Description of Artificial Sequence: Synthetic oligonucleotide
auguagacugc

SEQ ID NO: 155828 - RNA, 12 nt, Artificial Sequence
  Description of Artificial Sequence: Synthetic oligonucleotide
gaucuauuuaug

SEQ ID NO: 155829 - RNA, 11 nt, Artificial Sequence
  Description of Artificial Sequence: Synthetic oligonucleotide
cacuauuauca

SEQ ID NO: 155830 - RNA, 10 nt, Artificial Sequence
  Description of Artificial Sequence: Synthetic oligonucleotide
ucaguucugc

SEQ ID NO: 155831 - RNA, 12 nt, Artificial Sequence
  Description of Artificial Sequence: Synthetic oligonucleotide
gauuaaaccuac

SEQ ID NO: 155832 - RNA, 12 nt, Artificial Sequence
  Description of Artificial Sequence: Synthetic oligonucleotide
uaaaauccuucu

SEQ ID NO: 155833 - RNA, 11 nt, Artificial Sequence
  Description of Artificial Sequence: Synthetic oligonucleotide
augcuguagac

SEQ ID NO: 155834 - RNA, 12 nt, Artificial Sequence
  Description of Artificial Sequence: Synthetic oligonucleotide
ugauaggaauag

SEQ ID NO: 155835 - RNA, 10 nt, Artificial Sequence
  Description of Artificial Sequence: Synthetic oligonucleotide
auggcccuga

SEQ ID NO: 155836 - RNA, 10 nt, Artificial Sequence
  Description of Artificial Sequence: Synthetic oligonucleotide
uccucaagca

SEQ ID NO: 155837 - RNA, 9 nt, Artificial Sequence
  Description of Artificial Sequence: Synthetic oligonucleotide
uucagccca

SEQ ID NO: 155838 - RNA, 10 nt, Artificial Sequence
  Description of Artificial Sequence: Synthetic oligonucleotide
cugcugaacc

SEQ ID NO: 155839 - RNA, 11 nt, Artificial Sequence
  Description of Artificial Sequence: Synthetic oligonucleotide
aguucucuuca

SEQ ID NO: 155840 - RNA, 10 nt, Artificial Sequence
  Description of Artificial Sequence: Synthetic oligonucleotide
cagccuagag

SEQ ID NO: 155841 - RNA, 12 nt, Artificial Sequence
  Description of Artificial Sequence: Synthetic oligonucleotide
ucugugaagugu

SEQ ID NO: 155842 - RNA, 13 nt, Artificial Sequence
  Description of Artificial Sequence: Synthetic oligonucleotide
gagaaaauuucaa

SEQ ID NO: 155843 - RNA, 10 nt, Artificial Sequence
  Description of Artificial Sequence: Synthetic oligonucleotide
auccuccuga

SEQ ID NO: 155844 - RNA, 11 nt, Artificial Sequence
  Description of Artificial Sequence: Synthetic oligonucleotide
ugacaucauau

SEQ ID NO: 155845 - RNA, 12 nt, Artificial Sequence
  Description of Artificial Sequence: Synthetic oligonucleotide
aucuucaucaua

SEQ ID NO: 155846 - RNA, 12 nt, Artificial Sequence
  Description of Artificial Sequence: Synthetic oligonucleotide
acuagcuauuaa

SEQ ID NO: 155847 - RNA, 13 nt, Artificial Sequence
  Description of Artificial Sequence: Synthetic oligonucleotide
cucuacuaaaaau

SEQ ID NO: 155848 - RNA, 11 nt, Artificial Sequence
  Description of Artificial Sequence: Synthetic oligonucleotide
cuaucucgccu

SEQ ID NO: 155849 - RNA, 12 nt, Artificial Sequence
  Description of Artificial Sequence: Synthetic oligonucleotide
uucgguccaguu

SEQ ID NO: 155850 - RNA, 10 nt, Artificial Sequence
  Description of Artificial Sequence: Synthetic oligonucleotide
auguagccgc

SEQ ID NO: 155851 - RNA, 11 nt, Artificial Sequence
  Description of Artificial Sequence: Synthetic oligonucleotide
gaggagacuug

SEQ ID NO: 155852 - RNA, 11 nt, Artificial Sequence
  Description of Artificial Sequence: Synthetic oligonucleotide
aguagugagga

SEQ ID NO: 155853 - RNA, 13 nt, Artificial Sequence
  Description of Artificial Sequence: Synthetic oligonucleotide
agaugaguacaaa

SEQ ID NO: 155854 - RNA, 12 nt, Artificial Sequence
  Description of Artificial Sequence: Synthetic oligonucleotide
uuguuaaugggc

SEQ ID NO: 155855 - RNA, 12 nt, Artificial Sequence
  Description of Artificial Sequence: Synthetic oligonucleotide
uuuuaauuuauu

SEQ ID NO: 155856 - RNA, 11 nt, Artificial Sequence
  Description of Artificial Sequence: Synthetic oligonucleotide
auuuaaauaug

SEQ ID NO: 155857 - RNA, 12 nt, Artificial Sequence
  Description of Artificial Sequence: Synthetic oligonucleotide
auccuuuguuuc

SEQ ID NO: 155858 - RNA, 13 nt, Artificial Sequence
  Description of Artificial Sequence: Synthetic oligonucleotide
gucuaaguguuug

SEQ ID NO: 155859 - RNA, 11 nt, Artificial Sequence
  Description of Artificial Sequence: Synthetic oligonucleotide
ccugugacaaa

SEQ ID NO: 155860 - RNA, 12 nt, Artificial Sequence
  Description of Artificial Sequence: Synthetic oligonucleotide
caggcugaauua

SEQ ID NO: 155861 - RNA, 13 nt, Artificial Sequence
  Description of Artificial Sequence: Synthetic oligonucleotide
ucauucuuacaau

SEQ ID NO: 155862 - RNA, 14 nt, Artificial Sequence
  Description of Artificial Sequence: Synthetic oligonucleotide
cauucuuacaauug

SEQ ID NO: 155863 - RNA, 11 nt, Artificial Sequence
  Description of Artificial Sequence: Synthetic oligonucleotide
agagaguguac

SEQ ID NO: 155864 - RNA, 11 nt, Artificial Sequence
  Description of Artificial Sequence: Synthetic oligonucleotide
gaacucagcag

SEQ ID NO: 155865 - RNA, 12 nt, Artificial Sequence
  Description of Artificial Sequence: Synthetic oligonucleotide
uuauuuucagua

SEQ ID NO: 155866 - RNA, 11 nt, Artificial Sequence
  Description of Artificial Sequence: Synthetic oligonucleotide
cuuaaauggaa

SEQ ID NO: 155867 - RNA, 12 nt, Artificial Sequence
  Description of Artificial Sequence: Synthetic oligonucleotide
gccuaaaauugu

SEQ ID NO: 155868 - RNA, 12 nt, Artificial Sequence
  Description of Artificial Sequence: Synthetic oligonucleotide
acuaacaucugg

SEQ ID NO: 155869 - RNA, 11 nt, Artificial Sequence
  Description of Artificial Sequence: Synthetic oligonucleotide
gacugugagcu

SEQ ID NO: 155870 - RNA, 13 nt, Artificial Sequence
  Description of Artificial Sequence: Synthetic oligonucleotide
gcuuuuuauuaau

SEQ ID NO: 155871 - RNA, 12 nt, Artificial Sequence
  Description of Artificial Sequence: Synthetic oligonucleotide
ucuucuuacauu

SEQ ID NO: 155872 - RNA, 14 nt, Artificial Sequence
  Description of Artificial Sequence: Synthetic oligonucleotide
auuuguaaaaaugu

SEQ ID NO: 155873 - RNA, 14 nt, Artificial Sequence
  Description of Artificial Sequence: Synthetic oligonucleotide
ucuuaauucauauu

SEQ ID NO: 155874 - RNA, 12 nt, Artificial Sequence
  Description of Artificial Sequence: Synthetic oligonucleotide
aacuaaucauga

SEQ ID NO: 155875 - RNA, 11 nt, Artificial Sequence
  Description of Artificial Sequence: Synthetic oligonucleotide
cugcucuuggg

SEQ ID NO: 155876 - RNA, 12 nt, Artificial Sequence
  Description of Artificial Sequence: Synthetic oligonucleotide
aguagcuuugag

SEQ ID NO: 155877 - RNA, 13 nt, Artificial Sequence
  Description of Artificial Sequence: Synthetic oligonucleotide
acguaauauuuca

SEQ ID NO: 155878 - RNA, 12 nt, Artificial Sequence
  Description of Artificial Sequence: Synthetic oligonucleotide
auucucuucacu

SEQ ID NO: 155879 - RNA, 13 nt, Artificial Sequence
  Description of Artificial Sequence: Synthetic oligonucleotide
uaaugcuaagaaa

SEQ ID NO: 155880 - RNA, 11 nt, Artificial Sequence
  Description of Artificial Sequence: Synthetic oligonucleotide
cugaaaaucaa

SEQ ID NO: 155881 - RNA, 13 nt, Artificial Sequence
  Description of Artificial Sequence: Synthetic oligonucleotide
auaugauuacuuu

SEQ ID NO: 155882 - RNA, 13 nt, Artificial Sequence
  Description of Artificial Sequence: Synthetic oligonucleotide
auuuuguucuaca

SEQ ID NO: 155883 - RNA, 11 nt, Artificial Sequence
  Description of Artificial Sequence: Synthetic oligonucleotide
ccgggacucuc

SEQ ID NO: 155884 - RNA, 13 nt, Artificial Sequence
  Description of Artificial Sequence: Synthetic oligonucleotide
cuuuaaaguaaag

SEQ ID NO: 155885 - RNA, 12 nt, Artificial Sequence
  Description of Artificial Sequence: Synthetic oligonucleotide
cuggaagccugg

SEQ ID NO: 155886 - RNA, 13 nt, Artificial Sequence
  Description of Artificial Sequence: Synthetic oligonucleotide
aaacaaaagagag

SEQ ID NO: 155887 - RNA, 12 nt, Artificial Sequence
  Description of Artificial Sequence: Synthetic oligonucleotide
ucaguuaugccg

SEQ ID NO: 155888 - RNA, 12 nt, Artificial Sequence
  Description of Artificial Sequence: Synthetic oligonucleotide
aaaagaagucca

SEQ ID NO: 155889 - RNA, 10 nt, Artificial Sequence
  Description of Artificial Sequence: Synthetic oligonucleotide
ggugagguua

SEQ ID NO: 155890 - RNA, 10 nt, Artificial Sequence
  Description of Artificial Sequence: Synthetic oligonucleotide
ggaagaggac

SEQ ID NO: 155891 - RNA, 12 nt, Artificial Sequence
  Description of Artificial Sequence: Synthetic oligonucleotide
agcaaguauugu

SEQ ID NO: 155892 - RNA, 11 nt, Artificial Sequence
  Description of Artificial Sequence: Synthetic oligonucleotide
uuguagcacuc

SEQ ID NO: 155893 - RNA, 13 nt, Artificial Sequence
  Description of Artificial Sequence: Synthetic oligonucleotide
caaaaccacaaau

SEQ ID NO: 155894 - RNA, 11 nt, Artificial Sequence
  Description of Artificial Sequence: Synthetic oligonucleotide
aagcccauaca

SEQ ID NO: 155895 - RNA, 10 nt, Artificial Sequence
  Description of Artificial Sequence: Synthetic oligonucleotide
gcccauacag

SEQ ID NO: 155896 - RNA, 11 nt, Artificial Sequence
  Description of Artificial Sequence: Synthetic oligonucleotide
agaaaccuucc

SEQ ID NO: 155897 - RNA, 9 nt, Artificial Sequence
  Description of Artificial Sequence: Synthetic oligonucleotide
uauaccuac

SEQ ID NO: 155898 - RNA, 12 nt, Artificial Sequence
  Description of Artificial Sequence: Synthetic oligonucleotide
ccaguuuucgga

SEQ ID NO: 155899 - RNA, 8 nt, Artificial Sequence
  Description of Artificial Sequence: Synthetic oligonucleotide
gaacaggg

SEQ ID NO: 155900 - RNA, 12 nt, Artificial Sequence
  Description of Artificial Sequence: Synthetic oligonucleotide
uaacuuuccagu

SEQ ID NO: 155901 - RNA, 13 nt, Artificial Sequence
  Description of Artificial Sequence: Synthetic oligonucleotide
aaguuugguuuug

SEQ ID NO: 155902 - RNA, 11 nt, Artificial Sequence
  Description of Artificial Sequence: Synthetic oligonucleotide
uucccacugua

SEQ ID NO: 155903 - RNA, 12 nt, Artificial Sequence
  Description of Artificial Sequence: Synthetic oligonucleotide
gauaccauauga

SEQ ID NO: 155904 - RNA, 10 nt, Artificial Sequence
  Description of Artificial Sequence: Synthetic oligonucleotide
acaugggcug

SEQ ID NO: 155905 - RNA, 12 nt, Artificial Sequence
  Description of Artificial Sequence: Synthetic oligonucleotide
aacuuuuucaua

SEQ ID NO: 155906 - RNA, 11 nt, Artificial Sequence
  Description of Artificial Sequence: Synthetic oligonucleotide
augaggccgga

SEQ ID NO: 155907 - RNA, 10 nt, Artificial Sequence
  Description of Artificial Sequence: Synthetic oligonucleotide
cugcauuugu

SEQ ID NO: 155908 - RNA, 12 nt, Artificial Sequence
  Description of Artificial Sequence: Synthetic oligonucleotide
auguuuacuacc

SEQ ID NO: 155909 - RNA, 14 nt, Artificial Sequence
  Description of Artificial Sequence: Synthetic oligonucleotide
auuuuuugaugaaa

SEQ ID NO: 155910 - RNA, 13 nt, Artificial Sequence
  Description of Artificial Sequence: Synthetic oligonucleotide
agugugugaauuu

SEQ ID NO: 155911 - RNA, 12 nt, Artificial Sequence
  Description of Artificial Sequence: Synthetic oligonucleotide
agcaauguaugu

SEQ ID NO: 155912 - RNA, 13 nt, Artificial Sequence
  Description of Artificial Sequence: Synthetic oligonucleotide
aagcacauauaua

SEQ ID NO: 155913 - RNA, 13 nt, Artificial Sequence
  Description of Artificial Sequence: Synthetic oligonucleotide
uaauaguuucucc

SEQ ID NO: 155914 - RNA, 12 nt, Artificial Sequence
  Description of Artificial Sequence: Synthetic oligonucleotide
guuucuccaaau

SEQ ID NO: 155915 - RNA, 12 nt, Artificial Sequence
  Description of Artificial Sequence: Synthetic oligonucleotide
acuuccuagaaa

SEQ ID NO: 155916 - RNA, 12 nt, Artificial Sequence
  Description of Artificial Sequence: Synthetic oligonucleotide
acaccauauaug

SEQ ID NO: 155917 - RNA, 13 nt, Artificial Sequence
  Description of Artificial Sequence: Synthetic oligonucleotide
uauaugaauggag

SEQ ID NO: 155918 - RNA, 12 nt, Artificial Sequence
  Description of Artificial Sequence: Synthetic oligonucleotide
cauuuacaggga

SEQ ID NO: 155919 - RNA, 12 nt, Artificial Sequence
  Description of Artificial Sequence: Synthetic oligonucleotide
auuuacagggac

SEQ ID NO: 155920 - RNA, 9 nt, Artificial Sequence
  Description of Artificial Sequence: Synthetic oligonucleotide
gggaccuga

SEQ ID NO: 155921 - RNA, 13 nt, Artificial Sequence
  Description of Artificial Sequence: Synthetic oligonucleotide
guuugacugcauc

SEQ ID NO: 155922 - RNA, 12 nt, Artificial Sequence
  Description of Artificial Sequence: Synthetic oligonucleotide
uugacugcaucg

SEQ ID NO: 155923 - RNA, 11 nt, Artificial Sequence
  Description of Artificial Sequence: Synthetic oligonucleotide
aguucacaggg

SEQ ID NO: 155924 - RNA, 12 nt, Artificial Sequence
  Description of Artificial Sequence: Synthetic oligonucleotide
gcaccucugucc

SEQ ID NO: 155925 - RNA, 14 nt, Artificial Sequence
  Description of Artificial Sequence: Synthetic oligonucleotide
guuugucuuuuuaa

SEQ ID NO: 155926 - RNA, 13 nt, Artificial Sequence
  Description of Artificial Sequence: Synthetic oligonucleotide
uugucuuuuuaag

SEQ ID NO: 155927 - RNA, 12 nt, Artificial Sequence
  Description of Artificial Sequence: Synthetic oligonucleotide
cuaaagguuguc

SEQ ID NO: 155928 - RNA, 11 nt, Artificial Sequence
  Description of Artificial Sequence: Synthetic oligonucleotide
agguugucgac

SEQ ID NO: 155929 - RNA, 12 nt, Artificial Sequence
  Description of Artificial Sequence: Synthetic oligonucleotide
ccuggcaauugu

SEQ ID NO: 155930 - RNA, 11 nt, Artificial Sequence
  Description of Artificial Sequence: Synthetic oligonucleotide
guggugcgagg

SEQ ID NO: 155931 - RNA, 12 nt, Artificial Sequence
  Description of Artificial Sequence: Synthetic oligonucleotide
gagacaugaaau

SEQ ID NO: 155932 - RNA, 12 nt, Artificial Sequence
  Description of Artificial Sequence: Synthetic oligonucleotide
uauauuucucca

SEQ ID NO: 155933 - RNA, 9 nt, Artificial Sequence
  Description of Artificial Sequence: Synthetic oligonucleotide
augaaggcu

SEQ ID NO: 155934 - RNA, 10 nt, Artificial Sequence
  Description of Artificial Sequence: Synthetic oligonucleotide
cuggaguggu

SEQ ID NO: 155935 - RNA, 10 nt, Artificial Sequence
  Description of Artificial Sequence: Synthetic oligonucleotide
ggaagagagg

SEQ ID NO: 155936 - RNA, 11 nt, Artificial Sequence
  Description of Artificial Sequence: Synthetic oligonucleotide
uugcaucgggc

SEQ ID NO: 155937 - RNA, 12 nt, Artificial Sequence
  Description of Artificial Sequence: Synthetic oligonucleotide
uauccuacugug

SEQ ID NO: 155938 - RNA, 12 nt, Artificial Sequence
  Description of Artificial Sequence: Synthetic oligonucleotide
ccuacuguguaa

SEQ ID NO: 155939 - RNA, 11 nt, Artificial Sequence
  Description of Artificial Sequence: Synthetic oligonucleotide
cuuguagugua

SEQ ID NO: 155940 - RNA, 12 nt, Artificial Sequence
  Description of Artificial Sequence: Synthetic oligonucleotide
cuuuguugauug

SEQ ID NO: 155941 - RNA, 13 nt, Artificial Sequence
  Description of Artificial Sequence: Synthetic oligonucleotide
uuguugauugaaa

SEQ ID NO: 155942 - RNA, 14 nt, Artificial Sequence
  Description of Artificial Sequence: Synthetic oligonucleotide
ucuuuuucuuccau

SEQ ID NO: 155943 - RNA, 12 nt, Artificial Sequence
  Description of Artificial Sequence: Synthetic oligonucleotide
aucuuccuucua

SEQ ID NO: 155944 - RNA, 12 nt, Artificial Sequence
  Description of Artificial Sequence: Synthetic oligonucleotide
ugaaugcuucau

SEQ ID NO: 155945 - RNA, 12 nt, Artificial Sequence
  Description of Artificial Sequence: Synthetic oligonucleotide
gaaugcuucaug

SEQ ID NO: 155946 - RNA, 12 nt, Artificial Sequence
  Description of Artificial Sequence: Synthetic oligonucleotide
auucuacuuuga

SEQ ID NO: 155947 - RNA, 12 nt, Artificial Sequence
  Description of Artificial Sequence: Synthetic oligonucleotide
gcaacuacagac

SEQ ID NO: 155948 - RNA, 12 nt, Artificial Sequence
  Description of Artificial Sequence: Synthetic oligonucleotide
accaaggucaac

SEQ ID NO: 155949 - RNA, 12 nt, Artificial Sequence
  Description of Artificial Sequence: Synthetic oligonucleotide
gacuaucucgac

SEQ ID NO: 155950 - RNA, 12 nt, Artificial Sequence
  Description of Artificial Sequence: Synthetic oligonucleotide
accuucccaaac

SEQ ID NO: 155951 - RNA, 13 nt, Artificial Sequence
  Description of Artificial Sequence: Synthetic oligonucleotide
caagcuuagaacu

SEQ ID NO: 155952 - RNA, 14 nt, Artificial Sequence
  Description of Artificial Sequence: Synthetic oligonucleotide
gcuuagaacuuuaa

SEQ ID NO: 155953 - RNA, 13 nt, Artificial Sequence
  Description of Artificial Sequence: Synthetic oligonucleotide
aacuuuaagcaac

SEQ ID NO: 155954 - RNA, 10 nt, Artificial Sequence
  Description of Artificial Sequence: Synthetic oligonucleotide
agaccaccac

SEQ ID NO: 155955 - RNA, 13 nt, Artificial Sequence
  Description of Artificial Sequence: Synthetic oligonucleotide
cgagaaauaaagu

SEQ ID NO: 155956 - RNA, 13 nt, Artificial Sequence
  Description of Artificial Sequence: Synthetic oligonucleotide
gagaaauaaaguu

SEQ ID NO: 155957 - RNA, 11 nt, Artificial Sequence
  Description of Artificial Sequence: Synthetic oligonucleotide
ggaaaugaucc

SEQ ID NO: 155958 - RNA, 12 nt, Artificial Sequence
  Description of Artificial Sequence: Synthetic oligonucleotide
aagaaaugaaac

SEQ ID NO: 155959 - RNA, 12 nt, Artificial Sequence
  Description of Artificial Sequence: Synthetic oligonucleotide
uuuccauccucc

SEQ ID NO: 155960 - RNA, 14 nt, Artificial Sequence
  Description of Artificial Sequence: Synthetic oligonucleotide
cugaaaaucuuuga

SEQ ID NO: 155961 - RNA, 10 nt, Artificial Sequence
  Description of Artificial Sequence: Synthetic oligonucleotide
gccguucagg

SEQ ID NO: 155962 - RNA, 12 nt, Artificial Sequence
  Description of Artificial Sequence: Synthetic oligonucleotide
aggguccagaag

SEQ ID NO: 155963 - RNA, 12 nt, Artificial Sequence
  Description of Artificial Sequence: Synthetic oligonucleotide
caagacugcuug

SEQ ID NO: 155964 - RNA, 12 nt, Artificial Sequence
  Description of Artificial Sequence: Synthetic oligonucleotide
ccaugucuuugg

SEQ ID NO: 155965 - RNA, 10 nt, Artificial Sequence
  Description of Artificial Sequence: Synthetic oligonucleotide
ccugaaacac

SEQ ID NO: 155966 - RNA, 11 nt, Artificial Sequence
  Description of Artificial Sequence: Synthetic oligonucleotide
cucuguaccuc

SEQ ID NO: 155967 - RNA, 11 nt, Artificial Sequence
  Description of Artificial Sequence: Synthetic oligonucleotide
gcaagacaaga

SEQ ID NO: 155968 - RNA, 12 nt, Artificial Sequence
  Description of Artificial Sequence: Synthetic oligonucleotide
caagacaagaaa

SEQ ID NO: 155969 - RNA, 11 nt, Artificial Sequence
  Description of Artificial Sequence: Synthetic oligonucleotide
guacaagaucc

SEQ ID NO: 155970 - RNA, 11 nt, Artificial Sequence
  Description of Artificial Sequence: Synthetic oligonucleotide
guacuugcaga

SEQ ID NO: 155971 - RNA, 12 nt, Artificial Sequence
  Description of Artificial Sequence: Synthetic oligonucleotide
gaucgauacaga

SEQ ID NO: 155972 - RNA, 12 nt, Artificial Sequence
  Description of Artificial Sequence: Synthetic oligonucleotide
auaaaaauaaau

SEQ ID NO: 155973 - RNA, 12 nt, Artificial Sequence
  Description of Artificial Sequence: Synthetic oligonucleotide
aaaaauaaauau

SEQ ID NO: 155974 - RNA, 12 nt, Artificial Sequence
  Description of Artificial Sequence: Synthetic oligonucleotide
uugacugcugug

SEQ ID NO: 155975 - RNA, 12 nt, Artificial Sequence
  Description of Artificial Sequence: Synthetic oligonucleotide
gagaugagagac

SEQ ID NO: 155976 - RNA, 9 nt, Artificial Sequence
  Description of Artificial Sequence: Synthetic oligonucleotide
cccacuugg

SEQ ID NO: 155977 - RNA, 993 nt, Homo sapiens
auuccacguucuuaacuguuccauuuuccguaucugcuucgggcuuccaccucauuuuuuucgcuuugcccauucuguuucagccagucgccaagaaucaugaaagucgccaguggcagcaccgccaccgccgccgcgggccccagcugcgcgcugaaggccggcaagacagcgagcggugcgggcgagguggugcgcugucugucugagcagagcguggccaucucgcgcugcgccgggggcgccggggcgcgccugccugcccugcuggacgagcagcagguaaacgugcugcucuacgacaugaacggcuguuacucacgccucaaggagcuggugcccacccugccccagaaccgcaaggugagcaagguggagauucuccagcacgucaucgacuacaucagggaccuucaguuggagcugaacucggaauccgaaguuggaacccccgggggccgagggcugccgguccgggcuccgcucagcacccucaacggcgagaucagcgcccugacggccgaggcggcaugcguuccugcggacgaucgcaucuugugucgcugaagcgccucccccagggaccggcggaccccagccauccagggggcaagaggaauuacgugcucugugggucucccccaacgcgccucgccggaucugagggagaacaagaccgaucggcggccacugcgcccuuaacugcauccagccuggggcugaggcugaggcacuggcgaggagagggcgcuccucucugcacaccuacuagucaccagagacuuuagggggugggauuccacucguguguuucuauuuuuugaaaagcagacauuuuaaaaaauggucacguuuggugcuucucagauuucugaggaaauugcuuuguauuguauauuacaaugaucaccgacugaaaauauuguuuuacaauaguucuguggggcuguuuuuuuguuauuaaacaaauaauuuagauggugaaaaaaaaaa

SEQ ID NO: 155978 - RNA, 1234 nt, Homo sapiens
auuccacguucuuaacuguuccauuuuccguaucugcuucgggcuuccaccucauuuuuuucgcuuugcccauucuguuucagccagucgccaagaaucaugaaagucgccaguggcagcaccgccaccgccgccgcgggccccagcugcgcgcugaaggccggcaagacagcgagcggugcgggcgagguggugcgcugucugucugagcagagcguggccaucucgcgcugcgccgggggcgccggggcgcgccugccugcccugcuggacgagcagcagguaaacgugcugcucuacgacaugaacggcuguuacucacgccucaaggagcuggugcccacccugccccagaaccgcaaggugagcaagguggagauucuccagcacgucaucgacuacaucagggaccuucaguuggagcugaacucggaauccgaaguuggaacccccgggggccgagggcugccgguccgggcuccgcucagcacccucaacggcgagaucagcgcccugacggccgaggugagauccagauccgaccacuagaucauccuuauaccgacggggaaacggaggccagagagggcgugggcgcuugcaccacuuccgucccauccuugcggguaccuggcuaugcgggggugccuaaggagccuggaaaaagcgcucccccgucgugcuuccuggggaagggggcguucgcugcgcucggagcggcgucccuuccaacccgccggucucauuucuucucguuuucacaggcggcaugcguuccugcggacgaucgcaucuugugucgcugaagcgccucccccagggaccggcggaccccagccauccagggggcaagaggaauuacgugcucugugggucucccccaacgcgccucgccggaucugagggagaacaagaccgaucggcggccacugcgcccuuaacugcauccagccuggggcugaggcugaggcacuggcgaggagagggcgcuccucucugcacaccuacuagucaccagagacuuuagggggugggauuccacucguguguuucuauuuuuugaaaagcagacauuuuaaaaaauggucacguuuggugcuucucagauuucugaggaaauugcuuuguauuguauauuacaaugaucaccgacugaaaauauuguuuuacaauaguucuguggggcuguuuuuuuguuauuaaacaaauaauuuagauggugaaaaaaaaaaaa

SEQ ID NO: 155979 - RNA, 19 nt, Artificial Sequence
  Description of Artificial Sequence: Synthetic oligonucleotide
auuccacguucuuaacugu

SEQ ID NO: 155980 - RNA, 19 nt, Artificial Sequence
  Description of Artificial Sequence: Synthetic oligonucleotide
uuccauuuuccguaucugc

SEQ ID NO: 155981 - RNA, 19 nt, Artificial Sequence
  Description of Artificial Sequence: Synthetic oligonucleotide
cuucgggcuuccaccucau

SEQ ID NO: 155982 - RNA, 19 nt, Artificial Sequence
  Description of Artificial Sequence: Synthetic oligonucleotide
uuuuuuucgcuuugcccau

SEQ ID NO: 155983 - RNA, 19 nt, Artificial Sequence
  Description of Artificial Sequence: Synthetic oligonucleotide
uucuguuucagccagucgc

SEQ ID NO: 155984 - RNA, 19 nt, Artificial Sequence
  Description of Artificial Sequence: Synthetic oligonucleotide
ccaagaaucaugaaagucg

SEQ ID NO: 155985 - RNA, 19 nt, Artificial Sequence
  Description of Artificial Sequence: Synthetic oligonucleotide
gccaguggcagcaccgcca

SEQ ID NO: 155986 - RNA, 19 nt, Artificial Sequence
  Description of Artificial Sequence: Synthetic oligonucleotide
accgccgccgcgggcccca

SEQ ID NO: 155987 - RNA, 19 nt, Artificial Sequence
  Description of Artificial Sequence: Synthetic oligonucleotide
agcugcgcgcugaaggccg

SEQ ID NO: 155988 - RNA, 19 nt, Artificial Sequence
  Description of Artificial Sequence: Synthetic oligonucleotide
ggcaagacagcgagcggug

SEQ ID NO: 155989 - RNA, 19 nt, Artificial Sequence
  Description of Artificial Sequence: Synthetic oligonucleotide
gcgggcgagguggugcgcu

SEQ ID NO: 155990 - RNA, 19 nt, Artificial Sequence
  Description of Artificial Sequence: Synthetic oligonucleotide
ugucugucugagcagagcg

SEQ ID NO: 155991 - RNA, 19 nt, Artificial Sequence
  Description of Artificial Sequence: Synthetic oligonucleotide
guggccaucucgcgcugcg

SEQ ID NO: 155992 - RNA, 19 nt, Artificial Sequence
  Description of Artificial Sequence: Synthetic oligonucleotide
gccgggggcgccggggcgc

SEQ ID NO: 155993 - RNA, 19 nt, Artificial Sequence
  Description of Artificial Sequence: Synthetic oligonucleotide
cgccugccugcccugcugg

SEQ ID NO: 155994 - RNA, 19 nt, Artificial Sequence
  Description of Artificial Sequence: Synthetic oligonucleotide
gacgagcagcagguaaacg

SEQ ID NO: 155995 - RNA, 19 nt, Artificial Sequence
  Description of Artificial Sequence: Synthetic oligonucleotide
gugcugcucuacgacauga

SEQ ID NO: 155996 - RNA, 19 nt, Artificial Sequence
  Description of Artificial Sequence: Synthetic oligonucleotide
aacggcuguuacucacgcc

SEQ ID NO: 155997 - RNA, 19 nt, Artificial Sequence
  Description of Artificial Sequence: Synthetic oligonucleotide
cucaaggagcuggugccca

SEQ ID NO: 155998 - RNA, 19 nt, Artificial Sequence
  Description of Artificial Sequence: Synthetic oligonucleotide
acccugccccagaaccgca

SEQ ID NO: 155999 - RNA, 19 nt, Artificial Sequence
  Description of Artificial Sequence: Synthetic oligonucleotide
aaggugagcaagguggaga

SEQ ID NO: 156000 - RNA, 19 nt, Artificial Sequence
  Description of Artificial Sequence: Synthetic oligonucleotide
auucuccagcacgucaucg

SEQ ID NO: 156001 - RNA, 19 nt, Artificial Sequence
  Description of Artificial Sequence: Synthetic oligonucleotide
gacuacaucagggaccuuc

SEQ ID NO: 156002 - RNA, 19 nt, Artificial Sequence
  Description of Artificial Sequence: Synthetic oligonucleotide
caguuggagcugaacucgg

SEQ ID NO: 156003 - RNA, 19 nt, Artificial Sequence
  Description of Artificial Sequence: Synthetic oligonucleotide
gaauccgaaguuggaaccc

SEQ ID NO: 156004 - RNA, 19 nt, Artificial Sequence
  Description of Artificial Sequence: Synthetic oligonucleotide
cccgggggccgagggcugc

SEQ ID NO: 156005 - RNA, 19 nt, Artificial Sequence
  Description of Artificial Sequence: Synthetic oligonucleotide
ccgguccgggcuccgcuca

SEQ ID NO: 156006 - RNA, 19 nt, Artificial Sequence
  Description of Artificial Sequence: Synthetic oligonucleotide
agcacccucaacggcgaga

SEQ ID NO: 156007 - RNA, 19 nt, Artificial Sequence
  Description of Artificial Sequence: Synthetic oligonucleotide
aucagcgcccugacggccg

SEQ ID NO: 156008 - RNA, 19 nt, Artificial Sequence
  Description of Artificial Sequence: Synthetic oligonucleotide
gaggcggcaugcguuccug

SEQ ID NO: 156009 - RNA, 19 nt, Artificial Sequence
  Description of Artificial Sequence: Synthetic oligonucleotide
gcggacgaucgcaucuugu

SEQ ID NO: 156010 - RNA, 19 nt, Artificial Sequence
  Description of Artificial Sequence: Synthetic oligonucleotide
ugucgcugaagcgccuccc

SEQ ID NO: 156011 - RNA, 19 nt, Artificial Sequence
  Description of Artificial Sequence: Synthetic oligonucleotide
cccagggaccggcggaccc

SEQ ID NO: 156012 - RNA, 19 nt, Artificial Sequence
  Description of Artificial Sequence: Synthetic oligonucleotide
ccagccauccagggggcaa

SEQ ID NO: 156013 - RNA, 19 nt, Artificial Sequence
  Description of Artificial Sequence: Synthetic oligonucleotide
agaggaauuacgugcucug

SEQ ID NO: 156014 - RNA, 19 nt, Artificial Sequence
  Description of Artificial Sequence: Synthetic oligonucleotide
gugggucucccccaacgcg

SEQ ID NO: 156015 - RNA, 19 nt, Artificial Sequence
  Description of Artificial Sequence: Synthetic oligonucleotide
gccucgccggaucugaggg

SEQ ID NO: 156016 - RNA, 19 nt, Artificial Sequence
  Description of Artificial Sequence: Synthetic oligonucleotide
gagaacaagaccgaucggc

SEQ ID NO: 156017 - RNA, 19 nt, Artificial Sequence
  Description of Artificial Sequence: Synthetic oligonucleotide
cggccacugcgcccuuaac

SEQ ID NO: 156018 - RNA, 19 nt, Artificial Sequence
  Description of Artificial Sequence: Synthetic oligonucleotide
cugcauccagccuggggcu

SEQ ID NO: 156019 - RNA, 19 nt, Artificial Sequence
  Description of Artificial Sequence: Synthetic oligonucleotide
ugaggcugaggcacuggcg

SEQ ID NO: 156020 - RNA, 19 nt, Artificial Sequence
  Description of Artificial Sequence: Synthetic oligonucleotide
gaggagagggcgcuccucu

SEQ ID NO: 156021 - RNA, 19 nt, Artificial Sequence
  Description of Artificial Sequence: Synthetic oligonucleotide
ucugcacaccuacuaguca

SEQ ID NO: 156022 - RNA, 19 nt, Artificial Sequence
  Description of Artificial Sequence: Synthetic oligonucleotide
accagagacuuuagggggu

SEQ ID NO: 156023 - RNA, 19 nt, Artificial Sequence
  Description of Artificial Sequence: Synthetic oligonucleotide
ugggauuccacucgugugu

SEQ ID NO: 156024 - RNA, 19 nt, Artificial Sequence
  Description of Artificial Sequence: Synthetic oligonucleotide
uuucuauuuuuugaaaagc

SEQ ID NO: 156025 - RNA, 19 nt, Artificial Sequence
  Description of Artificial Sequence: Synthetic oligonucleotide
cagacauuuuaaaaaaugg

SEQ ID NO: 156026 - RNA, 19 nt, Artificial Sequence
  Description of Artificial Sequence: Synthetic oligonucleotide
gucacguuuggugcuucuc

SEQ ID NO: 156027 - RNA, 19 nt, Artificial Sequence
  Description of Artificial Sequence: Synthetic oligonucleotide
cagauuucugaggaaauug

SEQ ID NO: 156028 - RNA, 19 nt, Artificial Sequence
  Description of Artificial Sequence: Synthetic oligonucleotide
gcuuuguauuguauauuac

SEQ ID NO: 156029 - RNA, 19 nt, Artificial Sequence
  Description of Artificial Sequence: Synthetic oligonucleotide
caaugaucaccgacugaaa

SEQ ID NO: 156030 - RNA, 19 nt, Artificial Sequence
  Description of Artificial Sequence: Synthetic oligonucleotide
aauauuguuuuacaauagu

SEQ ID NO: 156031 - RNA, 19 nt, Artificial Sequence
  Description of Artificial Sequence: Synthetic oligonucleotide
uucuguggggcuguuuuuu

SEQ ID NO: 156032 - RNA, 19 nt, Artificial Sequence
  Description of Artificial Sequence: Synthetic oligonucleotide
uuguuauuaaacaaauaau

SEQ ID NO: 156033 - RNA, 19 nt, Artificial Sequence
  Description of Artificial Sequence: Synthetic oligonucleotide
uuuagauggugaaaaaaaa

SEQ ID NO: 156034 - RNA, 19 nt, Artificial Sequence
  Description of Artificial Sequence: Synthetic oligonucleotide
gaggugagauccagauccg

SEQ ID NO: 156035 - RNA, 19 nt, Artificial Sequence
  Description of Artificial Sequence: Synthetic oligonucleotide
gaccacuagaucauccuua

SEQ ID NO: 156036 - RNA, 19 nt, Artificial Sequence
  Description of Artificial Sequence: Synthetic oligonucleotide
auaccgacggggaaacgga

SEQ ID NO: 156037 - RNA, 19 nt, Artificial Sequence
  Description of Artificial Sequence: Synthetic oligonucleotide
aggccagagagggcguggg

SEQ ID NO: 156038 - RNA, 19 nt, Artificial Sequence
  Description of Artificial Sequence: Synthetic oligonucleotide
gcgcuugcaccacuuccgu

SEQ ID NO: 156039 - RNA, 19 nt, Artificial Sequence
  Description of Artificial Sequence: Synthetic oligonucleotide
ucccauccuugcggguacc

SEQ ID NO: 156040 - RNA, 19 nt, Artificial Sequence
  Description of Artificial Sequence: Synthetic oligonucleotide
cuggcuaugcgggggugcc

SEQ ID NO: 156041 - RNA, 19 nt, Artificial Sequence
  Description of Artificial Sequence: Synthetic oligonucleotide
cuaaggagccuggaaaaag

SEQ ID NO: 156042 - RNA, 19 nt, Artificial Sequence
  Description of Artificial Sequence: Synthetic oligonucleotide
gcgcucccccgucgugcuu

SEQ ID NO: 156043 - RNA, 19 nt, Artificial Sequence
  Description of Artificial Sequence: Synthetic oligonucleotide
uccuggggaagggggcguu

SEQ ID NO: 156044 - RNA, 19 nt, Artificial Sequence
  Description of Artificial Sequence: Synthetic oligonucleotide
ucgcugcgcucggagcggc

SEQ ID NO: 156045 - RNA, 19 nt, Artificial Sequence
  Description of Artificial Sequence: Synthetic oligonucleotide
cgucccuuccaacccgccg

SEQ ID NO: 156046 - RNA, 19 nt, Artificial Sequence
  Description of Artificial Sequence: Synthetic oligonucleotide
ggucucauuucuucucguu

SEQ ID NO: 156047 - RNA, 19 nt, Artificial Sequence
  Description of Artificial Sequence: Synthetic oligonucleotide
uuucacaggcggcaugcgu

SEQ ID NO: 156048 - RNA, 19 nt, Artificial Sequence
  Description of Artificial Sequence: Synthetic oligonucleotide
uuccugcggacgaucgcau

SEQ ID NO: 156049 - RNA, 19 nt, Artificial Sequence
  Description of Artificial Sequence: Synthetic oligonucleotide
ucuugugucgcugaagcgc

SEQ ID NO: 156050 - RNA, 19 nt, Artificial Sequence
  Description of Artificial Sequence: Synthetic oligonucleotide
ccucccccagggaccggcg

SEQ ID NO: 156051 - RNA, 19 nt, Artificial Sequence
  Description of Artificial Sequence: Synthetic oligonucleotide
ggaccccagccauccaggg

SEQ ID NO: 156052 - RNA, 19 nt, Artificial Sequence
  Description of Artificial Sequence: Synthetic oligonucleotide
gggcaagaggaauuacgug

SEQ ID NO: 156053 - RNA, 19 nt, Artificial Sequence
  Description of Artificial Sequence: Synthetic oligonucleotide
gcucugugggucuccccca

SEQ ID NO: 156054 - RNA, 19 nt, Artificial Sequence
  Description of Artificial Sequence: Synthetic oligonucleotide
aacgcgccucgccggaucu

SEQ ID NO: 156055 - RNA, 19 nt, Artificial Sequence
  Description of Artificial Sequence: Synthetic oligonucleotide
ugagggagaacaagaccga

SEQ ID NO: 156056 - RNA, 19 nt, Artificial Sequence
  Description of Artificial Sequence: Synthetic oligonucleotide
aucggcggccacugcgccc

SEQ ID NO: 156057 - RNA, 19 nt, Artificial Sequence
  Description of Artificial Sequence: Synthetic oligonucleotide
cuuaacugcauccagccug

SEQ ID NO: 156058 - RNA, 19 nt, Artificial Sequence
  Description of Artificial Sequence: Synthetic oligonucleotide
ggggcugaggcugaggcac

SEQ ID NO: 156059 - RNA, 19 nt, Artificial Sequence
  Description of Artificial Sequence: Synthetic oligonucleotide
cuggcgaggagagggcgcu

SEQ ID NO: 156060 - RNA, 19 nt, Artificial Sequence
  Description of Artificial Sequence: Synthetic oligonucleotide
uccucucugcacaccuacu

SEQ ID NO: 156061 - RNA, 19 nt, Artificial Sequence
  Description of Artificial Sequence: Synthetic oligonucleotide
uagucaccagagacuuuag

SEQ ID NO: 156062 - RNA, 19 nt, Artificial Sequence
  Description of Artificial Sequence: Synthetic oligonucleotide
gggggugggauuccacucg

SEQ ID NO: 156063 - RNA, 19 nt, Artificial Sequence
  Description of Artificial Sequence: Synthetic oligonucleotide
guguguuucuauuuuuuga

SEQ ID NO: 156064 - RNA, 19 nt, Artificial Sequence
  Description of Artificial Sequence: Synthetic oligonucleotide
aaaagcagacauuuuaaaa

SEQ ID NO: 156065 - RNA, 19 nt, Artificial Sequence
  Description of Artificial Sequence: Synthetic oligonucleotide
aaauggucacguuuggugc

SEQ ID NO: 156066 - RNA, 19 nt, Artificial Sequence
  Description of Artificial Sequence: Synthetic oligonucleotide
cuucucagauuucugagga

SEQ ID NO: 156067 - RNA, 19 nt, Artificial Sequence
  Description of Artificial Sequence: Synthetic oligonucleotide
aaauugcuuuguauuguau

SEQ ID NO: 156068 - RNA, 19 nt, Artificial Sequence
  Description of Artificial Sequence: Synthetic oligonucleotide
uauuacaaugaucaccgac

SEQ ID NO: 156069 - RNA, 19 nt, Artificial Sequence
  Description of Artificial Sequence: Synthetic oligonucleotide
cugaaaauauuguuuuaca

SEQ ID NO: 156070 - RNA, 19 nt, Artificial Sequence
  Description of Artificial Sequence: Synthetic oligonucleotide
aauaguucuguggggcugu

SEQ ID NO: 156071 - RNA, 19 nt, Artificial Sequence
  Description of Artificial Sequence: Synthetic oligonucleotide
uuuuuuuguuauuaaacaa

SEQ ID NO: 156072 - RNA, 19 nt, Artificial Sequence
  Description of Artificial Sequence: Synthetic oligonucleotide
aauaauuuagauggugaaa

SEQ ID NO: 156073 - RNA, 25 nt, Artificial Sequence
  Description of Artificial Sequence: Synthetic oligonucleotide
auuccacguucuuaacuguuccauu

SEQ ID NO: 156074 - RNA, 25 nt, Artificial Sequence
  Description of Artificial Sequence: Synthetic oligonucleotide
uuuccguaucugcuucgggcuucca

SEQ ID NO: 156075 - RNA, 25 nt, Artificial Sequence
  Description of Artificial Sequence: Synthetic oligonucleotide
accucauuuuuuucgcuuugcccau

SEQ ID NO: 156076 - RNA, 25 nt, Artificial Sequence
  Description of Artificial Sequence: Synthetic oligonucleotide
uucuguuucagccagucgccaagaa

SEQ ID NO: 156077 - RNA, 25 nt, Artificial Sequence
  Description of Artificial Sequence: Synthetic oligonucleotide
aucaugaaagucgccaguggcagca

SEQ ID NO: 156078 - RNA, 25 nt, Artificial Sequence
  Description of Artificial Sequence: Synthetic oligonucleotide
accgccaccgccgccgcgggcccca

SEQ ID NO: 156079 - RNA, 25 nt, Artificial Sequence
  Description of Artificial Sequence: Synthetic oligonucleotide
agcugcgcgcugaaggccggcaaga

SEQ ID NO: 156080 - RNA, 25 nt, Artificial Sequence
  Description of Artificial Sequence: Synthetic oligonucleotide
acagcgagcggugcgggcgaggugg

SEQ ID NO: 156081 - RNA, 25 nt, Artificial Sequence
  Description of Artificial Sequence: Synthetic oligonucleotide
gugcgcugucugucugagcagagcg

SEQ ID NO: 156082 - RNA, 25 nt, Artificial Sequence
  Description of Artificial Sequence: Synthetic oligonucleotide
guggccaucucgcgcugcgccgggg

SEQ ID NO: 156083 - RNA, 25 nt, Artificial Sequence
  Description of Artificial Sequence: Synthetic oligonucleotide
ggcgccggggcgcgccugccugccc

SEQ ID NO: 156084 - RNA, 25 nt, Artificial Sequence
  Description of Artificial Sequence: Synthetic oligonucleotide
cugcuggacgagcagcagguaaacg

SEQ ID NO: 156085 - RNA, 25 nt, Artificial Sequence
  Description of Artificial Sequence: Synthetic oligonucleotide
gugcugcucuacgacaugaacggcu

SEQ ID NO: 156086 - RNA, 25 nt, Artificial Sequence
  Description of Artificial Sequence: Synthetic oligonucleotide
uguuacucacgccucaaggagcugg

SEQ ID NO: 156087 - RNA, 25 nt, Artificial Sequence
  Description of Artificial Sequence: Synthetic oligonucleotide
gugcccacccugccccagaaccgca

SEQ ID NO: 156088 - RNA, 25 nt, Artificial Sequence
  Description of Artificial Sequence: Synthetic oligonucleotide
aaggugagcaagguggagauucucc

SEQ ID NO: 156089 - RNA, 25 nt, Artificial Sequence
  Description of Artificial Sequence: Synthetic oligonucleotide
cagcacgucaucgacuacaucaggg

SEQ ID NO: 156090 - RNA, 25 nt, Artificial Sequence
  Description of Artificial Sequence: Synthetic oligonucleotide
gaccuucaguuggagcugaacucgg

SEQ ID NO: 156091 - RNA, 25 nt, Artificial Sequence
  Description of Artificial Sequence: Synthetic oligonucleotide
gaauccgaaguuggaacccccgggg

SEQ ID NO: 156092 - RNA, 25 nt, Artificial Sequence
  Description of Artificial Sequence: Synthetic oligonucleotide
ggccgagggcugccgguccgggcuc

SEQ ID NO: 156093 - RNA, 25 nt, Artificial Sequence
  Description of Artificial Sequence: Synthetic oligonucleotide
ccgcucagcacccucaacggcgaga

SEQ ID NO: 156094 - RNA, 25 nt, Artificial Sequence
  Description of Artificial Sequence: Synthetic oligonucleotide
aucagcgcccugacggccgaggcgg

SEQ ID NO: 156095 - RNA, 25 nt, Artificial Sequence
  Description of Artificial Sequence: Synthetic oligonucleotide
gcaugcguuccugcggacgaucgca

SEQ ID NO: 156096 - RNA, 25 nt, Artificial Sequence
  Description of Artificial Sequence: Synthetic oligonucleotide
aucuugugucgcugaagcgccuccc

SEQ ID NO: 156097 - RNA, 25 nt, Artificial Sequence
  Description of Artificial Sequence: Synthetic oligonucleotide
cccagggaccggcggaccccagcca

SEQ ID NO: 156098 - RNA, 25 nt, Artificial Sequence
  Description of Artificial Sequence: Synthetic oligonucleotide
auccagggggcaagaggaauuacgu

SEQ ID NO: 156099 - RNA, 25 nt, Artificial Sequence
  Description of Artificial Sequence: Synthetic oligonucleotide
ugcucugugggucucccccaacgcg

SEQ ID NO: 156100 - RNA, 25 nt, Artificial Sequence
  Description of Artificial Sequence: Synthetic oligonucleotide
gccucgccggaucugagggagaaca

SEQ ID NO: 156101 - RNA, 25 nt, Artificial Sequence
  Description of Artificial Sequence: Synthetic oligonucleotide
aagaccgaucggcggccacugcgcc

SEQ ID NO: 156102 - RNA, 25 nt, Artificial Sequence
  Description of Artificial Sequence: Synthetic oligonucleotide
ccuuaacugcauccagccuggggcu

SEQ ID NO: 156103 - RNA, 25 nt, Artificial Sequence
  Description of Artificial Sequence: Synthetic oligonucleotide
ugaggcugaggcacuggcgaggaga

SEQ ID NO: 156104 - RNA, 25 nt, Artificial Sequence
  Description of Artificial Sequence: Synthetic oligonucleotide
agggcgcuccucucugcacaccuac

SEQ ID NO: 156105 - RNA, 25 nt, Artificial Sequence
  Description of Artificial Sequence: Synthetic oligonucleotide
cuagucaccagagacuuuagggggu

SEQ ID NO: 156106 - RNA, 25 nt, Artificial Sequence
  Description of Artificial Sequence: Synthetic oligonucleotide
ugggauuccacucguguguuucuau

SEQ ID NO: 156107 - RNA, 25 nt, Artificial Sequence
  Description of Artificial Sequence: Synthetic oligonucleotide
uuuuuugaaaagcagacauuuuaaa

SEQ ID NO: 156108 - RNA, 25 nt, Artificial Sequence
  Description of Artificial Sequence: Synthetic oligonucleotide
aaaauggucacguuuggugcuucuc

SEQ ID NO: 156109 - RNA, 25 nt, Artificial Sequence
  Description of Artificial Sequence: Synthetic oligonucleotide
cagauuucugaggaaauugcuuugu

SEQ ID NO: 156110 - RNA, 25 nt, Artificial Sequence
  Description of Artificial Sequence: Synthetic oligonucleotide
uauuguauauuacaaugaucaccga

SEQ ID NO: 156111 - RNA, 25 nt, Artificial Sequence
  Description of Artificial Sequence: Synthetic oligonucleotide
acugaaaauauuguuuuacaauagu

SEQ ID NO: 156112 - RNA, 25 nt, Artificial Sequence
  Description of Artificial Sequence: Synthetic oligonucleotide
uucuguggggcuguuuuuuuguuau

SEQ ID NO: 156113 - RNA, 25 nt, Artificial Sequence
  Description of Artificial Sequence: Synthetic oligonucleotide
uuaaacaaauaauuuagauggugaa

SEQ ID NO: 156114 - RNA, 25 nt, Artificial Sequence
  Description of Artificial Sequence: Synthetic oligonucleotide
aucagcgcccugacggccgagguga

SEQ ID NO: 156115 - RNA, 25 nt, Artificial Sequence
  Description of Artificial Sequence: Synthetic oligonucleotide
agauccagauccgaccacuagauca

SEQ ID NO: 156116 - RNA, 25 nt, Artificial Sequence
  Description of Artificial Sequence: Synthetic oligonucleotide
auccuuauaccgacggggaaacgga

SEQ ID NO: 156117 - RNA, 25 nt, Artificial Sequence
  Description of Artificial Sequence: Synthetic oligonucleotide
aggccagagagggcgugggcgcuug

SEQ ID NO: 156118 - RNA, 25 nt, Artificial Sequence
  Description of Artificial Sequence: Synthetic oligonucleotide
gcaccacuuccgucccauccuugcg

SEQ ID NO: 156119 - RNA, 25 nt, Artificial Sequence
  Description of Artificial Sequence: Synthetic oligonucleotide
ggguaccuggcuaugcgggggugcc

SEQ ID NO: 156120 - RNA, 25 nt, Artificial Sequence
  Description of Artificial Sequence: Synthetic oligonucleotide
cuaaggagccuggaaaaagcgcucc

SEQ ID NO: 156121 - RNA, 25 nt, Artificial Sequence
  Description of Artificial Sequence: Synthetic oligonucleotide
ccccgucgugcuuccuggggaaggg

SEQ ID NO: 156122 - RNA, 25 nt, Artificial Sequence
  Description of Artificial Sequence: Synthetic oligonucleotide
gggcguucgcugcgcucggagcggc

SEQ ID NO: 156123 - RNA, 25 nt, Artificial Sequence
  Description of Artificial Sequence: Synthetic oligonucleotide
cgucccuuccaacccgccggucuca

SEQ ID NO: 156124 - RNA, 25 nt, Artificial Sequence
  Description of Artificial Sequence: Synthetic oligonucleotide
auuucuucucguuuucacaggcggc

SEQ ID NO: 156125 - RNA, 25 nt, Artificial Sequence
  Description of Artificial Sequence: Synthetic oligonucleotide
caugcguuccugcggacgaucgcau

SEQ ID NO: 156126 - RNA, 25 nt, Artificial Sequence
  Description of Artificial Sequence: Synthetic oligonucleotide
ucuugugucgcugaagcgccucccc

SEQ ID NO: 156127 - RNA, 25 nt, Artificial Sequence
  Description of Artificial Sequence: Synthetic oligonucleotide
ccagggaccggcggaccccagccau

SEQ ID NO: 156128 - RNA, 25 nt, Artificial Sequence
  Description of Artificial Sequence: Synthetic oligonucleotide
uccagggggcaagaggaauuacgug

SEQ ID NO: 156129 - RNA, 25 nt, Artificial Sequence
  Description of Artificial Sequence: Synthetic oligonucleotide
gcucugugggucucccccaacgcgc

SEQ ID NO: 156130 - RNA, 25 nt, Artificial Sequence
  Description of Artificial Sequence: Synthetic oligonucleotide
ccucgccggaucugagggagaacaa

SEQ ID NO: 156131 - RNA, 25 nt, Artificial Sequence
  Description of Artificial Sequence: Synthetic oligonucleotide
agaccgaucggcggccacugcgccc

SEQ ID NO: 156132 - RNA, 25 nt, Artificial Sequence
  Description of Artificial Sequence: Synthetic oligonucleotide
cuuaacugcauccagccuggggcug

SEQ ID NO: 156133 - RNA, 25 nt, Artificial Sequence
  Description of Artificial Sequence: Synthetic oligonucleotide
gaggcugaggcacuggcgaggagag

SEQ ID NO: 156134 - RNA, 25 nt, Artificial Sequence
  Description of Artificial Sequence: Synthetic oligonucleotide
gggcgcuccucucugcacaccuacu

SEQ ID NO: 156135 - RNA, 25 nt, Artificial Sequence
  Description of Artificial Sequence: Synthetic oligonucleotide
uagucaccagagacuuuagggggug

SEQ ID NO: 156136 - RNA, 25 nt, Artificial Sequence
  Description of Artificial Sequence: Synthetic oligonucleotide
gggauuccacucguguguuucuauu

SEQ ID NO: 156137 - RNA, 25 nt, Artificial Sequence
  Description of Artificial Sequence: Synthetic oligonucleotide
uuuuugaaaagcagacauuuuaaaa

SEQ ID NO: 156138 - RNA, 25 nt, Artificial Sequence
  Description of Artificial Sequence: Synthetic oligonucleotide
aaauggucacguuuggugcuucuca

SEQ ID NO: 156139 - RNA, 25 nt, Artificial Sequence
  Description of Artificial Sequence: Synthetic oligonucleotide
agauuucugaggaaauugcuuugua

SEQ ID NO: 156140 - RNA, 25 nt, Artificial Sequence
  Description of Artificial Sequence: Synthetic oligonucleotide
auuguauauuacaaugaucaccgac

SEQ ID NO: 156141 - RNA, 25 nt, Artificial Sequence
  Description of Artificial Sequence: Synthetic oligonucleotide
cugaaaauauuguuuuacaauaguu

SEQ ID NO: 156142 - RNA, 25 nt, Artificial Sequence
  Description of Artificial Sequence: Synthetic oligonucleotide
ucuguggggcuguuuuuuuguuauu

SEQ ID NO: 156143 - RNA, 25 nt, Artificial Sequence
  Description of Artificial Sequence: Synthetic oligonucleotide
uaaacaaauaauuuagauggugaaa

SEQ ID NO: 156144 - DNA, 21 bp, Artificial Sequence
  Description of Artificial Sequence: Synthetic oligonucleotide
  Description of Combined DNA/RNA Molecule: Synthetic oligonucleotide
cuacacaaaucagcgauuutt

SEQ ID NO: 156145 - DNA, 21 bp, Artificial Sequence
  Description of Artificial Sequence: Synthetic oligonucleotide
  Description of Combined DNA/RNA Molecule: Synthetic oligonucleotide
aaaucgcugauuuguguagtt

SEQ ID NO: 156146 - DNA, 25 bp, Artificial Sequence
  Description of Artificial Sequence: Synthetic oligonucleotide
  Description of Combined DNA/RNA Molecule: Synthetic oligonucleotide
cuacacaaaucagcgauuuccaugt

SEQ ID NO: 156147 - RNA, 27 nt, Artificial Sequence
  Description of Artificial Sequence: Synthetic oligonucleotide
acauggaaaucgcugauuuguguaguc

SEQ ID NO: 156148 - RNA, 13 nt, Artificial Sequence
  Description of Artificial Sequence: Synthetic oligonucleotide
cuacacaaaucag

SEQ ID NO: 156149 - DNA, 11 bp, Artificial Sequence
  Description of Artificial Sequence: Synthetic oligonucleotide
  Description of Combined DNA/RNA Molecule: Synthetic oligonucleotide
gauuuccaugt

SEQ ID NO: 156150 - DNA, 21 bp, Artificial Sequence
  Description of Artificial Sequence: Synthetic oligonucleotide
  Description of Combined DNA/RNA Molecule: Synthetic oligonucleotide
ggaucuuauuucuucggagtt

SEQ ID NO: 156151 - DNA, 21 bp, Artificial Sequence
  Description of Artificial Sequence: Synthetic oligonucleotide
  Description of Combined DNA/RNA Molecule: Synthetic oligonucleotide
cuccgaagaaauaagaucctt

SEQ ID NO: 156152 - RNA, 11 nt, Artificial Sequence
  Description of Artificial Sequence: Synthetic oligonucleotide
ggaucuuauuu

SEQ ID NO: 156153 - DNA, 10 bp, Artificial Sequence
  Description of Artificial Sequence: Synthetic oligonucleotide
  Description of Combined DNA/RNA Molecule: Synthetic oligonucleotide
cuucggagtt

SEQ ID NO: 156154 - RNA, 27 nt, Artificial Sequence
  Description of Artificial Sequence: Synthetic oligonucleotide
cauugucuccgaagaaauaagauccuu

SEQ ID NO: 156155 - RNA, 8 nt, Artificial Sequence
  Description of Artificial Sequence: Synthetic oligonucleotide
  modified_base (2): LNA-G
ggaucuua

SEQ ID NO: 156156 - DNA, 17 bp, Artificial Sequence
  Description of Artificial Sequence: Synthetic oligonucleotide
  Description of Combined DNA/RNA Molecule: Synthetic oligonucleotide
uuucuucggagacaatg

SEQ ID NO: 156157 - DNA, 16 bp, Artificial Sequence
  Description of Artificial Sequence: Synthetic oligonucleotide
  Description of Combined DNA/RNA Molecule: Synthetic oligonucleotide
uucuucggagacaatg

SEQ ID NO: 156158 - DNA, 15 bp, Artificial Sequence
  Description of Artificial Sequence: Synthetic oligonucleotide
  Description of Combined DNA/RNA Molecule: Synthetic oligonucleotide
ucuucggagacaatg

SEQ ID NO: 156159 - DNA, 14 bp, Artificial Sequence
  Description of Artificial Sequence: Synthetic oligonucleotide
  Description of Combined DNA/RNA Molecule: Synthetic oligonucleotide
cuucggagacaatg

SEQ ID NO: 156160 - DNA, 13 bp, Artificial Sequence
  Description of Artificial Sequence: Synthetic oligonucleotide
  Description of Combined DNA/RNA Molecule: Synthetic oligonucleotide
uucggagacaatg

SEQ ID NO: 156161 - DNA, 12 bp, Artificial Sequence
  Description of Artificial Sequence: Synthetic oligonucleotide
  Description of Combined DNA/RNA Molecule: Synthetic oligonucleotide
ucggagacaatg

SEQ ID NO: 156162 - DNA, 11 bp, Artificial Sequence
  Description of Artificial Sequence: Synthetic oligonucleotide
  Description of Combined DNA/RNA Molecule: Synthetic oligonucleotide
cggagacaatg

SEQ ID NO: 156163 - RNA, 9 nt, Artificial Sequence
  Description of Artificial Sequence: Synthetic oligonucleotide
  modified_base (2): LNA-G
ggaucuuau

SEQ ID NO: 156164 - RNA, 10 nt, Artificial Sequence
  Description of Artificial Sequence: Synthetic oligonucleotide
  modified_base (2): LNA-G
ggaucuuauu

SEQ ID NO: 156165 - RNA, 11 nt, Artificial Sequence
  Description of Artificial Sequence: Synthetic oligonucleotide
  modified_base (2): LNA-G
ggaucuuauuu

SEQ ID NO: 156166 - RNA, 12 nt, Artificial Sequence
  Description of Artificial Sequence: Synthetic oligonucleotide
  modified_base (2): LNA-G
ggaucuuauuuc

SEQ ID NO: 156167 - RNA, 8 nt, Artificial Sequence
  Description of Artificial Sequence: Synthetic oligonucleotide
  modified_base (3): LNA-A
cuacacaa

SEQ ID NO: 156168 - DNA, 13 bp, Artificial Sequence
  Description of Artificial Sequence: Synthetic oligonucleotide
  Description of Combined DNA/RNA Molecule: Synthetic oligonucleotide
  modified_base (8): LNA-A
aucagcgauuutt

SEQ ID NO: 156169 - DNA, 12 bp, Artificial Sequence
  Description of Artificial Sequence: Synthetic oligonucleotide
  Description of Combined DNA/RNA Molecule: Synthetic oligonucleotide
  modified_base (7): LNA-A
ucagcgauuutt

SEQ ID NO: 156170 - DNA, 11 bp, Artificial Sequence
  Description of Artificial Sequence: Synthetic oligonucleotide
  Description of Combined DNA/RNA Molecule: Synthetic oligonucleotide
  modified_base (6): LNA-A
cagcgauuutt

SEQ ID NO: 156171 - DNA, 10 bp, Artificial Sequence
  Description of Artificial Sequence: Synthetic oligonucleotide
  Description of Combined DNA/RNA Molecule: Synthetic oligonucleotide
  modified_base (5): LNA-A
agcgauuutt

SEQ ID NO: 156172 - DNA, 9 bp, Artificial Sequence
  Description of Artificial Sequence: Synthetic oligonucleotide
  Description of Combined DNA/RNA Molecule: Synthetic oligonucleotide
  modified_base (4): LNA-A
gcgauuutt

SEQ ID NO: 156173 - DNA, 8 bp, Artificial Sequence
  Description of Artificial Sequence: Synthetic oligonucleotide
  Description of Combined DNA/RNA Molecule: Synthetic oligonucleotide
  modified_base (3): LNA-A
cgauuutt

SEQ ID NO: 156174 - DNA, 7 bp, Artificial Sequence
  Description of Artificial Sequence: Synthetic oligonucleotide
  Description of Combined DNA/RNA Molecule: Synthetic oligonucleotide
  modified_base (2): LNA-A
gauuutt

SEQ ID NO: 156175 - RNA, 9 nt, Artificial Sequence
  Description of Artificial Sequence: Synthetic oligonucleotide
  modified_base (3): LNA-A
cuacacaaa

SEQ ID NO: 156176 - RNA, 10 nt, Artificial Sequence
  Description of Artificial Sequence: Synthetic oligonucleotide
  modified_base (3): LNA-A
cuacacaaau

SEQ ID NO: 156177 - RNA, 11 nt, Artificial Sequence
  Description of Artificial Sequence: Synthetic oligonucleotide
  modified_base (3): LNA-A
cuacacaaauc

SEQ ID NO: 156178 - RNA, 12 nt, Artificial Sequence
  Description of Artificial Sequence: Synthetic oligonucleotide
  modified_base (3): LNA-A
cuacacaaauca

SEQ ID NO: 156179 - RNA, 13 nt, Artificial Sequence
  Description of Artificial Sequence: Synthetic oligonucleotide
  modified_base (3): LNA-A
cuacacaaaucag

SEQ ID NO: 156180 - RNA, 14 nt, Artificial Sequence
  Description of Artificial Sequence: Synthetic oligonucleotide
  modified_base (3): LNA-A
cuacacaaaucagc

SEQ ID NO: 156181 - RNA, 13 nt, Artificial Sequence
  Description of Artificial Sequence: Synthetic oligonucleotide
  modified_base (2): LNA-G
ggaucuuauuucu

SEQ ID NO: 156182 - RNA, 14 nt, Artificial Sequence
  Description of Artificial Sequence: Synthetic oligonucleotide
  modified_base (2): LNA-G
ggaucuuauuucuu

SEQ ID NO: 156183 - RNA, 8 nt, Artificial Sequence
  Description of Artificial Sequence: Synthetic oligonucleotide
  modified_base (2): LNA-G
  modified_base (8): LNA-A
ggaucuua

SEQ ID NO: 156184 - RNA, 9 nt, Artificial Sequence
  Description of Artificial Sequence: Synthetic oligonucleotide
  modified_base (2): LNA-G
  modified_base (9): LNA-U
ggaucuuau

SEQ ID NO: 156185 - RNA, 10 nt, Artificial Sequence
  Description of Artificial Sequence: Synthetic oligonucleotide
  modified_base (2): LNA-G
  modified_base (10): LNA-U
ggaucuuauu

SEQ ID NO: 156186 - RNA, 11 nt, Artificial Sequence
  Description of Artificial Sequence: Synthetic oligonucleotide
  modified_base (2): LNA-G
  modified_base (11): LNA-U
ggaucuuauuu

SEQ ID NO: 156187 - RNA, 12 nt, Artificial Sequence
  Description of Artificial Sequence: Synthetic oligonucleotide
  modified_base (2): LNA-G
  modified_base (12): LNA-C
ggaucuuauuuc

SEQ ID NO: 156188 - RNA, 13 nt, Artificial Sequence
  Description of Artificial Sequence: Synthetic oligonucleotide
  modified_base (2): LNA-G
  modified_base (13): LNA-U
ggaucuuauuucu

SEQ ID NO: 156189 - RNA, 14 nt, Artificial Sequence
  Description of Artificial Sequence: Synthetic oligonucleotide
  modified_base (2): LNA-G
  modified_base (14): LNA-U
ggaucuuauuucuu

SEQ ID NO: 156190 - DNA, 13 bp, Artificial Sequence
  Description of Artificial Sequence: Synthetic oligonucleotide
  Description of Combined DNA/RNA Molecule: Synthetic oligonucleotide
  modified_base (8): LNA-G
uuucuucggagtt

SEQ ID NO: 156191 - DNA, 12 bp, Artificial Sequence
  Description of Artificial Sequence: Synthetic oligonucleotide
  Description of Combined DNA/RNA Molecule: Synthetic oligonucleotide
  modified_base (7): LNA-G
uucuucggagtt

SEQ ID NO: 156192 - DNA, 11 bp, Artificial Sequence
  Description of Artificial Sequence: Synthetic oligonucleotide
  Description of Combined DNA/RNA Molecule: Synthetic oligonucleotide
  modified_base (6): LNA-G
ucuucggagtt

SEQ ID NO: 156193 - DNA, 10 bp, Artificial Sequence
  Description of Artificial Sequence: Synthetic oligonucleotide
  Description of Combined DNA/RNA Molecule: Synthetic oligonucleotide
  modified_base (5): LNA-G
cuucggagtt

SEQ ID NO: 156194 - DNA, 9 bp, Artificial Sequence
  Description of Artificial Sequence: Synthetic oligonucleotide
  Description of Combined DNA/RNA Molecule: Synthetic oligonucleotide
  modified_base (4): LNA-G
uucggagtt

SEQ ID NO: 156195 - DNA, 8 bp, Artificial Sequence
  Description of Artificial Sequence: Synthetic oligonucleotide
  Description of Combined DNA/RNA Molecule: Synthetic oligonucleotide
  modified_base (3): LNA-G
ucggagtt

SEQ ID NO: 156196 - DNA, 7 bp, Artificial Sequence
  Description of Artificial Sequence: Synthetic oligonucleotide
  Description of Combined DNA/RNA Molecule: Synthetic oligonucleotide
  modified_base (2): LNA-G
cggagtt

SEQ ID NO: 156197 - DNA, 13 bp, Artificial Sequence
  Description of Artificial Sequence: Synthetic oligonucleotide
  Description of Combined DNA/RNA Molecule: Synthetic oligonucleotide
  modified_base (1): LNA-U
  modified_base (8): LNA-G
uuucuucggagtt

SEQ ID NO: 156198 - DNA, 12 bp, Artificial Sequence
  Description of Artificial Sequence: Synthetic oligonucleotide
  Description of Combined DNA/RNA Molecule: Synthetic oligonucleotide
  modified_base (1): LNA-U
  modified_base (7): LNA-G
uucuucggagtt

SEQ ID NO: 156199 - DNA, 11 bp, Artificial Sequence
  Description of Artificial Sequence: Synthetic oligonucleotide
  Description of Combined DNA/RNA Molecule: Synthetic oligonucleotide
  modified_base (1): LNA-U
  modified_base (6): LNA-G
ucuucggagtt

SEQ ID NO: 156200 - DNA, 10 bp, Artificial Sequence
  Description of Artificial Sequence: Synthetic oligonucleotide
  Description of Combined DNA/RNA Molecule: Synthetic oligonucleotide
  modified_base (1): LNA-C
  modified_base (5): LNA-G
cuucggagtt

SEQ ID NO: 156201 - DNA, 9 bp, Artificial Sequence
  Description of Artificial Sequence: Synthetic oligonucleotide
  Description of Combined DNA/RNA Molecule: Synthetic oligonucleotide
  modified_base (1): LNA-U
  modified_base (4): LNA-G
uucggagtt

SEQ ID NO: 156202 - DNA, 8 bp, Artificial Sequence
  Description of Artificial Sequence: Synthetic oligonucleotide
  Description of Combined DNA/RNA Molecule: Synthetic oligonucleotide
  modified_base (1): LNA-U
  modified_base (3): LNA-G
ucggagtt

SEQ ID NO: 156203 - DNA, 7 bp, Artificial Sequence
  Description of Artificial Sequence: Synthetic oligonucleotide
  Description of Combined DNA/RNA Molecule: Synthetic oligonucleotide
  modified_base (1): LNA-C
  modified_base (2): LNA-G
cggagtt

SEQ ID NO: 156204 - DNA, 21 bp, Artificial Sequence
  Description of Artificial Sequence: Synthetic oligonucleotide
  Description of Combined DNA/RNA Molecule: Synthetic oligonucleotide
  modified_base (2): LNA-G
  modified_base (16): LNA-G
ggaucuuauuucuucggagtt

SEQ ID NO: 156205 - DNA, 25 bp, Artificial Sequence
  Description of Artificial Sequence: Synthetic oligonucleotide
  Description of Combined DNA/RNA Molecule: Synthetic oligonucleotide
ggaucuuauuucuucggagacaatg

SEQ ID NO: 156206 - RNA, 25 nt, Artificial Sequence
  Description of Artificial Sequence: Synthetic oligonucleotide
guauuuugaugaggaguucacggcc

SEQ ID NO: 156207 - RNA, 25 nt, Artificial Sequence
  Description of Artificial Sequence: Synthetic oligonucleotide
ggcccagaugaucaccaucacacca

SEQ ID NO: 156208 - RNA, 25 nt, Artificial Sequence
  Description of Artificial Sequence: Synthetic oligonucleotide
gggaagaaaacuauccugcggguuu

SEQ ID NO: 156209 - RNA, 25 nt, Artificial Sequence
  Description of Artificial Sequence: Synthetic oligonucleotide
guuuuaauuuauuucauccaguuug

SEQ ID NO: 156210 - RNA, 25 nt, Artificial Sequence
  Description of Artificial Sequence: Synthetic oligonucleotide
acguagggaaauguuaaggacuucu

SEQ ID NO: 156211 - RNA, 25 nt, Artificial Sequence
  Description of Artificial Sequence: Synthetic oligonucleotide
ccaggguuuacccagugggacagag

SEQ ID NO: 156212 - RNA, 25 nt, Artificial Sequence
  Description of Artificial Sequence: Synthetic oligonucleotide
agcaagguuuaaauuuguuauugug

SEQ ID NO: 156213 - RNA, 25 nt, Artificial Sequence
  Description of Artificial Sequence: Synthetic oligonucleotide
uguauuauguuguucaaaugcauuu

SEQ ID NO: 156214 - RNA, 25 nt, Artificial Sequence
  Description of Artificial Sequence: Synthetic oligonucleotide
uuuuaaucuuugugacaggaaagcc

SEQ ID NO: 156215 - RNA, 25 nt, Artificial Sequence
  Description of Artificial Sequence: Synthetic oligonucleotide
uuaaucuuugugacaggaaagcccu

SEQ ID NO: 156216 - RNA, 25 nt, Artificial Sequence
  Description of Artificial Sequence: Synthetic oligonucleotide
gcugcuuaugucucccagcauggcc

SEQ ID NO: 156217 - RNA, 25 nt, Artificial Sequence
  Description of Artificial Sequence: Synthetic oligonucleotide
aaguguuucagaagcuucucccuga

SEQ ID NO: 156218 - RNA, 25 nt, Artificial Sequence
  Description of Artificial Sequence: Synthetic oligonucleotide
gaccaucaauaaggaagaagcccuu

SEQ ID NO: 156219 - RNA, 25 nt, Artificial Sequence
  Description of Artificial Sequence: Synthetic oligonucleotide
ccaucaauaaggaagaagcccuuca

SEQ ID NO: 156220 - RNA, 25 nt, Artificial Sequence
  Description of Artificial Sequence: Synthetic oligonucleotide
ucaauaaggaagaagcccuucagcg

SEQ ID NO: 156221 - RNA, 25 nt, Artificial Sequence
  Description of Artificial Sequence: Synthetic oligonucleotide
aauaaggaagaagcccuucagcggc

SEQ ID NO: 156222 - RNA, 25 nt, Artificial Sequence
  Description of Artificial Sequence: Synthetic oligonucleotide
aggaagaagcccuucagcggccagu

SEQ ID NO: 156223 - RNA, 25 nt, Artificial Sequence
  Description of Artificial Sequence: Synthetic oligonucleotide
gcauaacuaaaggugaaaagcuccg

SEQ ID NO: 156224 - RNA, 25 nt, Artificial Sequence
  Description of Artificial Sequence: Synthetic oligonucleotide
cauaacuaaaggugaaaagcuccgg

SEQ ID NO: 156225 - RNA, 25 nt, Artificial Sequence
  Description of Artificial Sequence: Synthetic oligonucleotide
cuacaucacgccagucaacagucug

SEQ ID NO: 156226 - RNA, 25 nt, Artificial Sequence
  Description of Artificial Sequence: Synthetic oligonucleotide
acuggauuuaagcagaguucaaaag

SEQ ID NO: 156227 - RNA, 25 nt, Artificial Sequence
  Description of Artificial Sequence: Synthetic oligonucleotide
cuggauuuaagcagaguucaaaagc

SEQ ID NO: 156228 - RNA, 25 nt, Artificial Sequence
  Description of Artificial Sequence: Synthetic oligonucleotide
gauuuaagcagaguucaaaagcccu

SEQ ID NO: 156229 - RNA, 25 nt, Artificial Sequence
  Description of Artificial Sequence: Synthetic oligonucleotide
auuuaagcagaguucaaaagcccuu

SEQ ID NO: 156230 - RNA, 25 nt, Artificial Sequence
  Description of Artificial Sequence: Synthetic oligonucleotide
uuaagcagaguucaaaagcccuuca

SEQ ID NO: 156231 - RNA, 25 nt, Artificial Sequence
  Description of Artificial Sequence: Synthetic oligonucleotide
uaagcagaguucaaaagcccuucag

SEQ ID NO: 156232 - RNA, 25 nt, Artificial Sequence
  Description of Artificial Sequence: Synthetic oligonucleotide
agcagaguucaaaagcccuucagcg

SEQ ID NO: 156233 - RNA, 25 nt, Artificial Sequence
  Description of Artificial Sequence: Synthetic oligonucleotide
cucagggucugagugaagccgcucg

SEQ ID NO: 156234 - RNA, 25 nt, Artificial Sequence
  Description of Artificial Sequence: Synthetic oligonucleotide
caagcaacuacaucacgccagucaa

SEQ ID NO: 156235 - RNA, 25 nt, Artificial Sequence
  Description of Artificial Sequence: Synthetic oligonucleotide
aucaauggcagcuucuuggugcgug

SEQ ID NO: 156236 - RNA, 25 nt, Artificial Sequence
  Description of Artificial Sequence: Synthetic oligonucleotide
uuccagcccacauuggauucaucag

SEQ ID NO: 156237 - RNA, 25 nt, Artificial Sequence
  Description of Artificial Sequence: Synthetic oligonucleotide
cagcugagaauguggaauaccuaag

SEQ ID NO: 156238 - RNA, 25 nt, Artificial Sequence
  Description of Artificial Sequence: Synthetic oligonucleotide
aacguaucuccuaauuugaggcuca

SEQ ID NO: 156239 - RNA, 25 nt, Artificial Sequence
  Description of Artificial Sequence: Synthetic oligonucleotide
ccuaaaauaauuucucuacaauugg

SEQ ID NO: 156240 - RNA, 25 nt, Artificial Sequence
  Description of Artificial Sequence: Synthetic oligonucleotide
uggaagauucagcuaguuaggagcc

SEQ ID NO: 156241 - RNA, 25 nt, Artificial Sequence
  Description of Artificial Sequence: Synthetic oligonucleotide
uuaaacucuccuagucaauauccac

SEQ ID NO: 156242 - RNA, 25 nt, Artificial Sequence
  Description of Artificial Sequence: Synthetic oligonucleotide
cagccuacaguuauguucagucaca

SEQ ID NO: 156243 - RNA, 25 nt, Artificial Sequence
  Description of Artificial Sequence: Synthetic oligonucleotide
guuauguucagucacacacacauac

SEQ ID NO: 156244 - RNA, 25 nt, Artificial Sequence
  Description of Artificial Sequence: Synthetic oligonucleotide
cacauacaaaauguuccuuuugcuu

SEQ ID NO: 156245 - RNA, 25 nt, Artificial Sequence
  Description of Artificial Sequence: Synthetic oligonucleotide
uccuuuugcuuuuaaaguaauuuuu

SEQ ID NO: 156246 - RNA, 25 nt, Artificial Sequence
  Description of Artificial Sequence: Synthetic oligonucleotide
ugaccugugaagcaacagucaaugg

SEQ ID NO: 156247 - RNA, 25 nt, Artificial Sequence
  Description of Artificial Sequence: Synthetic oligonucleotide
cuaucucacacaucgacaaaccaau

SEQ ID NO: 156248 - RNA, 25 nt, Artificial Sequence
  Description of Artificial Sequence: Synthetic oligonucleotide
uguccucaauuguacugcuaccacu

SEQ ID NO: 156249 - RNA, 25 nt, Artificial Sequence
  Description of Artificial Sequence: Synthetic oligonucleotide
aaaccguagcuggcaagcggucuua

SEQ ID NO: 156250 - RNA, 25 nt, Artificial Sequence
  Description of Artificial Sequence: Synthetic oligonucleotide
uagcuggcaagcggucuuaccggcu

SEQ ID NO: 156251 - RNA, 25 nt, Artificial Sequence
  Description of Artificial Sequence: Synthetic oligonucleotide
uuguaugguuaaaagauggguuacc

SEQ ID NO: 156252 - RNA, 25 nt, Artificial Sequence
  Description of Artificial Sequence: Synthetic oligonucleotide
ugguuaaaagauggguuaccugcga

SEQ ID NO: 156253 - RNA, 25 nt, Artificial Sequence
  Description of Artificial Sequence: Synthetic oligonucleotide
cagggaauuauacaaucuugcugag

SEQ ID NO: 156254 - RNA, 25 nt, Artificial Sequence
  Description of Artificial Sequence: Synthetic oligonucleotide
acaaucuugcugagcauaaaacagu

SEQ ID NO: 156255 - RNA, 25 nt, Artificial Sequence
  Description of Artificial Sequence: Synthetic oligonucleotide
ccaauaaugaagaguccuuuauccu

SEQ ID NO: 156256 - RNA, 25 nt, Artificial Sequence
  Description of Artificial Sequence: Synthetic oligonucleotide
acuuuggauguuccaacgcaaguug

SEQ ID NO: 156257 - RNA, 25 nt, Artificial Sequence
  Description of Artificial Sequence: Synthetic oligonucleotide
aaugcuuccacuaaacugaaaccau

SEQ ID NO: 156258 - RNA, 25 nt, Artificial Sequence
  Description of Artificial Sequence: Synthetic oligonucleotide
gagaaaguuugacuuuguuaaauau

SEQ ID NO: 156259 - RNA, 25 nt, Artificial Sequence
  Description of Artificial Sequence: Synthetic oligonucleotide
aaagaacuacuguauauuaaaaguu

SEQ ID NO: 156260 - RNA, 25 nt, Artificial Sequence
  Description of Artificial Sequence: Synthetic oligonucleotide
uuagaaauacggguuuugacuuaac

SEQ ID NO: 156261 - RNA, 25 nt, Artificial Sequence
  Description of Artificial Sequence: Synthetic oligonucleotide
aacauggguacagcaaacucagcac

SEQ ID NO: 156262 - RNA, 25 nt, Artificial Sequence
  Description of Artificial Sequence: Synthetic oligonucleotide
aaagacacagaagaugcugaccuca

SEQ ID NO: 156263 - RNA, 25 nt, Artificial Sequence
  Description of Artificial Sequence: Synthetic oligonucleotide
uaguagggagguuuauucagaucgc

SEQ ID NO: 156264 - RNA, 25 nt, Artificial Sequence
  Description of Artificial Sequence: Synthetic oligonucleotide
gccuucugcagcaggguucugggau

SEQ ID NO: 156265 - RNA, 25 nt, Artificial Sequence
  Description of Artificial Sequence: Synthetic oligonucleotide
ggucugguacauauuggaaauuaug

SEQ ID NO: 156266 - RNA, 25 nt, Artificial Sequence
  Description of Artificial Sequence: Synthetic oligonucleotide
cuaguccuuccgauggaagcacuag

SEQ ID NO: 156267 - RNA, 25 nt, Artificial Sequence
  Description of Artificial Sequence: Synthetic oligonucleotide
ccagugaauauuguuuuuaugugga

SEQ ID NO: 156268 - RNA, 25 nt, Artificial Sequence
  Description of Artificial Sequence: Synthetic oligonucleotide
augaauucaaguuggaauugguaga

SEQ ID NO: 156269 - RNA, 25 nt, Artificial Sequence
  Description of Artificial Sequence: Synthetic oligonucleotide
caggacacagauuuagacuuggaga

SEQ ID NO: 156270 - RNA, 25 nt, Artificial Sequence
  Description of Artificial Sequence: Synthetic oligonucleotide
cucaaagcacaguuacaguauucca

SEQ ID NO: 156271 - RNA, 25 nt, Artificial Sequence
  Description of Artificial Sequence: Synthetic oligonucleotide
accacugccaccacugaugaauuaa

SEQ ID NO: 156272 - RNA, 25 nt, Artificial Sequence
  Description of Artificial Sequence: Synthetic oligonucleotide
gaaacuacuagugccacaucaucac

SEQ ID NO: 156273 - RNA, 25 nt, Artificial Sequence
  Description of Artificial Sequence: Synthetic oligonucleotide
aagucggacagccucaccaaacaga

SEQ ID NO: 156274 - RNA, 25 nt, Artificial Sequence
  Description of Artificial Sequence: Synthetic oligonucleotide
gaaagcgaaaaauggaacaugaugg

SEQ ID NO: 156275 - RNA, 25 nt, Artificial Sequence
  Description of Artificial Sequence: Synthetic oligonucleotide
cccucugauuuagcauguagacugc

SEQ ID NO: 156276 - RNA, 25 nt, Artificial Sequence
  Description of Artificial Sequence: Synthetic oligonucleotide
ugagcuauuuaaggaucuauuuaug

SEQ ID NO: 156277 - RNA, 25 nt, Artificial Sequence
  Description of Artificial Sequence: Synthetic oligonucleotide
aaaaggugaaaaagcacuauuauca

SEQ ID NO: 156278 - RNA, 25 nt, Artificial Sequence
  Description of Artificial Sequence: Synthetic oligonucleotide
gaaaaagcacuauuaucaguucugc

SEQ ID NO: 156279 - RNA, 25 nt, Artificial Sequence
  Description of Artificial Sequence: Synthetic oligonucleotide
ggcugaaaagaaagauuaaaccuac

SEQ ID NO: 156280 - RNA, 25 nt, Artificial Sequence
  Description of Artificial Sequence: Synthetic oligonucleotide
uaaacccuuauaauaaaauccuucu

SEQ ID NO: 156281 - RNA, 25 nt, Artificial Sequence
  Description of Artificial Sequence: Synthetic oligonucleotide
cauacuauuagccaaugcuguagac

SEQ ID NO: 156282 - RNA, 25 nt, Artificial Sequence
  Description of Artificial Sequence: Synthetic oligonucleotide
gacagaagcauuuugauaggaauag

SEQ ID NO: 156283 - RNA, 25 nt, Artificial Sequence
  Description of Artificial Sequence: Synthetic oligonucleotide
agagcaaauaagauaauggcccuga

SEQ ID NO: 156284 - RNA, 25 nt, Artificial Sequence
  Description of Artificial Sequence: Synthetic oligonucleotide
ccaacauuuuucucuuccucaagca

SEQ ID NO: 156285 - RNA, 25 nt, Artificial Sequence
  Description of Artificial Sequence: Synthetic oligonucleotide
uuaaguaugagaaaaguucagccca

SEQ ID NO: 156286 - RNA, 25 nt, Artificial Sequence
  Description of Artificial Sequence: Synthetic oligonucleotide
caggaauaaagauggcugcugaacc

SEQ ID NO: 156287 - RNA, 25 nt, Artificial Sequence
  Description of Artificial Sequence: Synthetic oligonucleotide
aauuugaaugaccaaguucucuuca

SEQ ID NO: 156288 - RNA, 25 nt, Artificial Sequence
  Description of Artificial Sequence: Synthetic oligonucleotide
auguauaaagauagccagccuagag

SEQ ID NO: 156289 - RNA, 25 nt, Artificial Sequence
  Description of Artificial Sequence: Synthetic oligonucleotide
ggcuguaacuaucucugugaagugu

SEQ ID NO: 156290 - RNA, 25 nt, Artificial Sequence
  Description of Artificial Sequence: Synthetic oligonucleotide
ucugugaagugugagaaaauuucaa

SEQ ID NO: 156291 - RNA, 25 nt, Artificial Sequence
  Description of Artificial Sequence: Synthetic oligonucleotide
ccuuuaaggaaaugaauccuccuga

SEQ ID NO: 156292 - RNA, 25 nt, Artificial Sequence
  Description of Artificial Sequence: Synthetic oligonucleotide
aaggauacaaaaagugacaucauau

SEQ ID NO: 156293 - RNA, 25 nt, Artificial Sequence
  Description of Artificial Sequence: Synthetic oligonucleotide
agaugcaauuugaaucuucaucaua

SEQ ID NO: 156294 - RNA, 25 nt, Artificial Sequence
  Description of Artificial Sequence: Synthetic oligonucleotide
guucaaaacgaagacuagcuauuaa

SEQ ID NO: 156295 - RNA, 25 nt, Artificial Sequence
  Description of Artificial Sequence: Synthetic oligonucleotide
gugaaaccucaucucuacuaaaaau

SEQ ID NO: 156296 - RNA, 25 nt, Artificial Sequence
  Description of Artificial Sequence: Synthetic oligonucleotide
acgaaagagaagcucuaucucgccu

SEQ ID NO: 156297 - RNA, 25 nt, Artificial Sequence
  Description of Artificial Sequence: Synthetic oligonucleotide
cuccacaagcgccuucgguccaguu

SEQ ID NO: 156298 - RNA, 25 nt, Artificial Sequence
  Description of Artificial Sequence: Synthetic oligonucleotide
gagaagauuccaaagauguagccgc

SEQ ID NO: 156299 - RNA, 25 nt, Artificial Sequence
  Description of Artificial Sequence: Synthetic oligonucleotide
aaucuggauucaaugaggagacuug

SEQ ID NO: 156300 - RNA, 25 nt, Artificial Sequence
  Description of Artificial Sequence: Synthetic oligonucleotide
agaacagauuugagaguagugagga

SEQ ID NO: 156301 - RNA, 25 nt, Artificial Sequence
  Description of Artificial Sequence: Synthetic oligonucleotide
ccagagcugugcagaugaguacaaa

SEQ ID NO: 156302 - RNA, 25 nt, Artificial Sequence
  Description of Artificial Sequence: Synthetic oligonucleotide
ccucagauuguuguuguuaaugggc

SEQ ID NO: 156303 - RNA, 25 nt, Artificial Sequence
  Description of Artificial Sequence: Synthetic oligonucleotide
cuauuuuaauuauuuuuaauuuauu

SEQ ID NO: 156304 - RNA, 25 nt, Artificial Sequence
  Description of Artificial Sequence: Synthetic oligonucleotide
uuuaauuuauuaauauuuaaauaug

SEQ ID NO: 156305 - RNA, 25 nt, Artificial Sequence
  Description of Artificial Sequence: Synthetic oligonucleotide
augcaguuugaauauccuuuguuuc

SEQ ID NO: 156306 - RNA, 25 nt, Artificial Sequence
  Description of Artificial Sequence: Synthetic oligonucleotide
caugcugcuggcgucuaaguguuug

SEQ ID NO: 156307 - RNA, 25 nt, Artificial Sequence
  Description of Artificial Sequence: Synthetic oligonucleotide
agaugugcauuucaccugugacaaa

SEQ ID NO: 156308 - RNA, 25 nt, Artificial Sequence
  Description of Artificial Sequence: Synthetic oligonucleotide
ucaaaaccugugccaggcugaauua

SEQ ID NO: 156309 - RNA, 25 nt, Artificial Sequence
  Description of Artificial Sequence: Synthetic oligonucleotide
gaauguggguagucauucuuacaau

SEQ ID NO: 156310 - RNA, 25 nt, Artificial Sequence
  Description of Artificial Sequence: Synthetic oligonucleotide
auguggguagucauucuuacaauug

SEQ ID NO: 156311 - RNA, 25 nt, Artificial Sequence
  Description of Artificial Sequence: Synthetic oligonucleotide
ugaaaaugagcaucagagaguguac

SEQ ID NO: 156312 - RNA, 25 nt, Artificial Sequence
  Description of Artificial Sequence: Synthetic oligonucleotide
uugcuuuucauguagaacucagcag

SEQ ID NO: 156313 - RNA, 25 nt, Artificial Sequence
  Description of Artificial Sequence: Synthetic oligonucleotide
uguauuucuauauuuauuuucagua

SEQ ID NO: 156314 - RNA, 25 nt, Artificial Sequence
  Description of Artificial Sequence: Synthetic oligonucleotide
uuugauuaauguuucuuaaauggaa

SEQ ID NO: 156315 - RNA, 25 nt, Artificial Sequence
  Description of Artificial Sequence: Synthetic oligonucleotide
caacguguauagugccuaaaauugu

SEQ ID NO: 156316 - RNA, 25 nt, Artificial Sequence
  Description of Artificial Sequence: Synthetic oligonucleotide
cauauccuuggcuacuaacaucugg

SEQ ID NO: 156317 - RNA, 25 nt, Artificial Sequence
  Description of Artificial Sequence: Synthetic oligonucleotide
uacuaacaucuggagacugugagcu

SEQ ID NO: 156318 - RNA, 25 nt, Artificial Sequence
  Description of Artificial Sequence: Synthetic oligonucleotide
cauaaguugugugcuuuuuauuaau

SEQ ID NO: 156319 - RNA, 25 nt, Artificial Sequence
  Description of Artificial Sequence: Synthetic oligonucleotide
gcaucauuuuggcucuucuuacauu

SEQ ID NO: 156320 - RNA, 25 nt, Artificial Sequence
  Description of Artificial Sequence: Synthetic oligonucleotide
gcucuucuuacauuuguaaaaaugu

SEQ ID NO: 156321 - RNA, 25 nt, Artificial Sequence
  Description of Artificial Sequence: Synthetic oligonucleotide
agauuaggucaucuuaauucauauu

SEQ ID NO: 156322 - RNA, 25 nt, Artificial Sequence
  Description of Artificial Sequence: Synthetic oligonucleotide
auggaauugaaagaacuaaucauga

SEQ ID NO: 156323 - RNA, 25 nt, Artificial Sequence
  Description of Artificial Sequence: Synthetic oligonucleotide
cacacucauuccuucugcucuuggg

SEQ ID NO: 156324 - RNA, 25 nt, Artificial Sequence
  Description of Artificial Sequence: Synthetic oligonucleotide
uguagagguaaccaguagcuuugag

SEQ ID NO: 156325 - RNA, 25 nt, Artificial Sequence
  Description of Artificial Sequence: Synthetic oligonucleotide
caaccacaugccacguaauauuuca

SEQ ID NO: 156326 - RNA, 25 nt, Artificial Sequence
  Description of Artificial Sequence: Synthetic oligonucleotide
ucggaaacaaguuauucucuucacu

SEQ ID NO: 156327 - RNA, 25 nt, Artificial Sequence
  Description of Artificial Sequence: Synthetic oligonucleotide
acucccaauaacuaaugcuaagaaa

SEQ ID NO: 156328 - RNA, 25 nt, Artificial Sequence
  Description of Artificial Sequence: Synthetic oligonucleotide
aaugcuaagaaaugcugaaaaucaa

SEQ ID NO: 156329 - RNA, 25 nt, Artificial Sequence
  Description of Artificial Sequence: Synthetic oligonucleotide
gucuuucucuaaauaugauuacuuu

SEQ ID NO: 156330 - RNA, 25 nt, Artificial Sequence
  Description of Artificial Sequence: Synthetic oligonucleotide
ugaauuucaggcauuuuguucuaca

SEQ ID NO: 156331 - RNA, 25 nt, Artificial Sequence
  Description of Artificial Sequence: Synthetic oligonucleotide
cgauucccucucacccgggacucuc

SEQ ID NO: 156332 - RNA, 25 nt, Artificial Sequence
  Description of Artificial Sequence: Synthetic oligonucleotide
aggaaagugaaccuuuaaaguaaag

SEQ ID NO: 156333 - RNA, 25 nt, Artificial Sequence
  Description of Artificial Sequence: Synthetic oligonucleotide
gaggcugcaugcucuggaagccugg

SEQ ID NO: 156334 - RNA, 25 nt, Artificial Sequence
  Description of Artificial Sequence: Synthetic oligonucleotide
ucucugaacagaaaacaaaagagag

SEQ ID NO: 156335 - RNA, 25 nt, Artificial Sequence
  Description of Artificial Sequence: Synthetic oligonucleotide
aacuuggcuguaaucaguuaugccg

SEQ ID NO: 156336 - RNA, 25 nt, Artificial Sequence
  Description of Artificial Sequence: Synthetic oligonucleotide
agaagccaaaauuaaaagaagucca

SEQ ID NO: 156337 - RNA, 25 nt, Artificial Sequence
  Description of Artificial Sequence: Synthetic oligonucleotide
auuaaaagaaguccaggugagguua

SEQ ID NO: 156338 - RNA, 25 nt, Artificial Sequence
  Description of Artificial Sequence: Synthetic oligonucleotide
gaauccggauuaucgggaagaggac

SEQ ID NO: 156339 - RNA, 25 nt, Artificial Sequence
  Description of Artificial Sequence: Synthetic oligonucleotide
aaugugacaucaaagcaaguauugu

SEQ ID NO: 156340 - RNA, 25 nt, Artificial Sequence
  Description of Artificial Sequence: Synthetic oligonucleotide
caucaaagcaaguauuguagcacuc

SEQ ID NO: 156341 - RNA, 25 nt, Artificial Sequence
  Description of Artificial Sequence: Synthetic oligonucleotide
agagagagaaaacaaaaccacaaau

SEQ ID NO: 156342 - RNA, 25 nt, Artificial Sequence
  Description of Artificial Sequence: Synthetic oligonucleotide
ucgcuguaguauuuaagcccauaca

SEQ ID NO: 156343 - RNA, 25 nt, Artificial Sequence
  Description of Artificial Sequence: Synthetic oligonucleotide
cgcuguaguauuuaagcccauacag

SEQ ID NO: 156344 - RNA, 25 nt, Artificial Sequence
  Description of Artificial Sequence: Synthetic oligonucleotide
auuuaagcccauacagaaaccuucc

SEQ ID NO: 156345 - RNA, 25 nt, Artificial Sequence
  Description of Artificial Sequence: Synthetic oligonucleotide
auuaaaauaaacaugguauaccuac

SEQ ID NO: 156346 - RNA, 25 nt, Artificial Sequence
  Description of Artificial Sequence: Synthetic oligonucleotide
cuguucugaucggccaguuuucgga

SEQ ID NO: 156347 - RNA, 25 nt, Artificial Sequence
  Description of Artificial Sequence: Synthetic oligonucleotide
aaauaauuugaacuuuggaacaggg

SEQ ID NO: 156348 - RNA, 25 nt, Artificial Sequence
  Description of Artificial Sequence: Synthetic oligonucleotide
ugcgaccuuaauuuaacuuuccagu

SEQ ID NO: 156349 - RNA, 25 nt, Artificial Sequence
  Description of Artificial Sequence: Synthetic oligonucleotide
cugagaaagcuaaaguuugguuuug

SEQ ID NO: 156350 - RNA, 25 nt, Artificial Sequence
  Description of Artificial Sequence: Synthetic oligonucleotide
aguaaagaugcuacuucccacugua

SEQ ID NO: 156351 - RNA, 25 nt, Artificial Sequence
  Description of Artificial Sequence: Synthetic oligonucleotide
cugcuuaauugcugauaccauauga

SEQ ID NO: 156352 - RNA, 25 nt, Artificial Sequence
  Description of Artificial Sequence: Synthetic oligonucleotide
uaccauaugaaugaaacaugggcug

SEQ ID NO: 156353 - RNA, 25 nt, Artificial Sequence
  Description of Artificial Sequence: Synthetic oligonucleotide
aacuuucuuauccaacuuuuucaua

SEQ ID NO: 156354 - RNA, 25 nt, Artificial Sequence
  Description of Artificial Sequence: Synthetic oligonucleotide
ccuugcaugacaucaugaggccgga

SEQ ID NO: 156355 - RNA, 25 nt, Artificial Sequence
  Description of Artificial Sequence: Synthetic oligonucleotide
ugaauuuguauaugacugcauuugu

SEQ ID NO: 156356 - RNA, 25 nt, Artificial Sequence
  Description of Artificial Sequence: Synthetic oligonucleotide
gaauccuaguagaauguuuacuacc

SEQ ID NO: 156357 - RNA, 25 nt, Artificial Sequence
  Description of Artificial Sequence: Synthetic oligonucleotide
gaaagggaagaauuuuuugaugaaa

SEQ ID NO: 156358 - RNA, 25 nt, Artificial Sequence
  Description of Artificial Sequence: Synthetic oligonucleotide
uaucggcaugccagugugugaauuu

SEQ ID NO: 156359 - RNA, 25 nt, Artificial Sequence
  Description of Artificial Sequence: Synthetic oligonucleotide
caccucauaguagagcaauguaugu

SEQ ID NO: 156360 - RNA, 25 nt, Artificial Sequence
  Description of Artificial Sequence: Synthetic oligonucleotide
ccagaauugccaaagcacauauaua

SEQ ID NO: 156361 - RNA, 25 nt, Artificial Sequence
  Description of Artificial Sequence: Synthetic oligonucleotide
uggugaucuggguaauaguuucucc

SEQ ID NO: 156362 - RNA, 25 nt, Artificial Sequence
  Description of Artificial Sequence: Synthetic oligonucleotide
gaucuggguaauaguuucuccaaau

SEQ ID NO: 156363 - RNA, 25 nt, Artificial Sequence
  Description of Artificial Sequence: Synthetic oligonucleotide
ggaugugaugaauacuuccuagaaa

SEQ ID NO: 156364 - RNA, 25 nt, Artificial Sequence
  Description of Artificial Sequence: Synthetic oligonucleotide
cauuuccacagcuacaccauauaug

SEQ ID NO: 156365 - RNA, 25 nt, Artificial Sequence
  Description of Artificial Sequence: Synthetic oligonucleotide
acagcuacaccauauaugaauggag

SEQ ID NO: 156366 - RNA, 25 nt, Artificial Sequence
  Description of Artificial Sequence: Synthetic oligonucleotide
ugcaguucuuacacgagaagaagau

SEQ ID NO: 156367 - RNA, 25 nt, Artificial Sequence
  Description of Artificial Sequence: Synthetic oligonucleotide
acgagaagaagaucauuuacaggga

SEQ ID NO: 156368 - RNA, 25 nt, Artificial Sequence
  Description of Artificial Sequence: Synthetic oligonucleotide
cgagaagaagaucauuuacagggac

SEQ ID NO: 156369 - RNA, 25 nt, Artificial Sequence
  Description of Artificial Sequence: Synthetic oligonucleotide
aagaagaucauuuacagggaccuga

SEQ ID NO: 156370 - RNA, 25 nt, Artificial Sequence
  Description of Artificial Sequence: Synthetic oligonucleotide
agaggaagagguguuugacugcauc

SEQ ID NO: 156371 - RNA, 25 nt, Artificial Sequence
  Description of Artificial Sequence: Synthetic oligonucleotide
gaggaagagguguuugacugcaucg

SEQ ID NO: 156372 - RNA, 25 nt, Artificial Sequence
  Description of Artificial Sequence: Synthetic oligonucleotide
cuacuuugagggcgaguucacaggg

SEQ ID NO: 156373 - RNA, 25 nt, Artificial Sequence
  Description of Artificial Sequence: Synthetic oligonucleotide
agggcaucuccuggcaccucugucc

SEQ ID NO: 156374 - RNA, 25 nt, Artificial Sequence
  Description of Artificial Sequence: Synthetic oligonucleotide
ggagugauaugguuugucuuuuuaa

SEQ ID NO: 156375 - RNA, 25 nt, Artificial Sequence
  Description of Artificial Sequence: Synthetic oligonucleotide
gagugauaugguuugucuuuuuaag

SEQ ID NO: 156376 - RNA, 25 nt, Artificial Sequence
  Description of Artificial Sequence: Synthetic oligonucleotide
ugcaguaaagauccuaaagguuguc

SEQ ID NO: 156377 - RNA, 25 nt, Artificial Sequence
  Description of Artificial Sequence: Synthetic oligonucleotide
aguaaagauccuaaagguugucgac

SEQ ID NO: 156378 - RNA, 25 nt, Artificial Sequence
  Description of Artificial Sequence: Synthetic oligonucleotide
ugacaaaggacaaccuggcaauugu

SEQ ID NO: 156379 - RNA, 25 nt, Artificial Sequence
  Description of Artificial Sequence: Synthetic oligonucleotide
gcaauugugacccaguggugcgagg

SEQ ID NO: 156380 - RNA, 25 nt, Artificial Sequence
  Description of Artificial Sequence: Synthetic oligonucleotide
aacaucauccauagagacaugaaau

SEQ ID NO: 156381 - RNA, 25 nt, Artificial Sequence
  Description of Artificial Sequence: Synthetic oligonucleotide
ugaaauccaacaauauauuucucca

SEQ ID NO: 156382 - RNA, 25 nt, Artificial Sequence
  Description of Artificial Sequence: Synthetic oligonucleotide
aacaauauauuucuccaugaaggcu

SEQ ID NO: 156383 - RNA, 25 nt, Artificial Sequence
  Description of Artificial Sequence: Synthetic oligonucleotide
aacaguaaagucacgcuggaguggu

SEQ ID NO: 156384 - RNA, 25 nt, Artificial Sequence
  Description of Artificial Sequence: Synthetic oligonucleotide
ugugaagaaaguaaaggaagagagg

SEQ ID NO: 156385 - RNA, 25 nt, Artificial Sequence
  Description of Artificial Sequence: Synthetic oligonucleotide
cuuccgagccauccuugcaucgggc

SEQ ID NO: 156386 - RNA, 25 nt, Artificial Sequence
  Description of Artificial Sequence: Synthetic oligonucleotide
aauggagguugaauauccuacugug

SEQ ID NO: 156387 - RNA, 25 nt, Artificial Sequence
  Description of Artificial Sequence: Synthetic oligonucleotide
ggagguugaauauccuacuguguaa

SEQ ID NO: 156388 - RNA, 25 nt, Artificial Sequence
  Description of Artificial Sequence: Synthetic oligonucleotide
auuuugaguuuucccuuguagugua

SEQ ID NO: 156389 - RNA, 25 nt, Artificial Sequence
  Description of Artificial Sequence: Synthetic oligonucleotide
uauccuguuuguucuuuguugauug

SEQ ID NO: 156390 - RNA, 25 nt, Artificial Sequence
  Description of Artificial Sequence: Synthetic oligonucleotide
ccuguuuguucuuuguugauugaaa

SEQ ID NO: 156391 - RNA, 25 nt, Artificial Sequence
  Description of Artificial Sequence: Synthetic oligonucleotide
cucuacagccuucuuuuucuuccau

SEQ ID NO: 156392 - RNA, 25 nt, Artificial Sequence
  Description of Artificial Sequence: Synthetic oligonucleotide
ucuuccauagcuaaucuuccuucua

SEQ ID NO: 156393 - RNA, 25 nt, Artificial Sequence
  Description of Artificial Sequence: Synthetic oligonucleotide
auaaucuuccuguugaaugcuucau

SEQ ID NO: 156394 - RNA, 25 nt, Artificial Sequence
  Description of Artificial Sequence: Synthetic oligonucleotide
uaaucuuccuguugaaugcuucaug

SEQ ID NO: 156395 - RNA, 25 nt, Artificial Sequence
  Description of Artificial Sequence: Synthetic oligonucleotide
cuucaugacuugaauucuacuuuga

SEQ ID NO: 156396 - RNA, 25 nt, Artificial Sequence
  Description of Artificial Sequence: Synthetic oligonucleotide
aagagggagagaagcaacuacagac

SEQ ID NO: 156397 - RNA, 25 nt, Artificial Sequence
  Description of Artificial Sequence: Synthetic oligonucleotide
cgucuccuaccagaccaaggucaac

SEQ ID NO: 156398 - RNA, 25 nt, Artificial Sequence
  Description of Artificial Sequence: Synthetic oligonucleotide
gaucaaucggcccgacuaucucgac

SEQ ID NO: 156399 - RNA, 25 nt, Artificial Sequence
  Description of Artificial Sequence: Synthetic oligonucleotide
ggacgaacauccaaccuucccaaac

SEQ ID NO: 156400 - RNA, 25 nt, Artificial Sequence
  Description of Artificial Sequence: Synthetic oligonucleotide
agggucggaacccaagcuuagaacu

SEQ ID NO: 156401 - RNA, 25 nt, Artificial Sequence
  Description of Artificial Sequence: Synthetic oligonucleotide
ucggaacccaagcuuagaacuuuaa

SEQ ID NO: 156402 - RNA, 25 nt, Artificial Sequence
  Description of Artificial Sequence: Synthetic oligonucleotide
acccaagcuuagaacuuuaagcaac

SEQ ID NO: 156403 - RNA, 25 nt, Artificial Sequence
  Description of Artificial Sequence: Synthetic oligonucleotide
gaacuuuaagcaacaagaccaccac

SEQ ID NO: 156404 - RNA, 25 nt, Artificial Sequence
  Description of Artificial Sequence: Synthetic oligonucleotide
acuauucaguggcgagaaauaaagu

SEQ ID NO: 156405 - RNA, 25 nt, Artificial Sequence
  Description of Artificial Sequence: Synthetic oligonucleotide
cuauucaguggcgagaaauaaaguu

SEQ ID NO: 156406 - RNA, 25 nt, Artificial Sequence
  Description of Artificial Sequence: Synthetic oligonucleotide
aaacacagauaacaggaaaugaucc

SEQ ID NO: 156407 - RNA, 25 nt, Artificial Sequence
  Description of Artificial Sequence: Synthetic oligonucleotide
cuuaagaaaagagaagaaaugaaac

SEQ ID NO: 156408 - RNA, 25 nt, Artificial Sequence
  Description of Artificial Sequence: Synthetic oligonucleotide
cugaaggaguguguuuccauccucc

SEQ ID NO: 156409 - RNA, 25 nt, Artificial Sequence
  Description of Artificial Sequence: Synthetic oligonucleotide
ucaccgcgggacugaaaaucuuuga

SEQ ID NO: 156410 - RNA, 25 nt, Artificial Sequence
  Description of Artificial Sequence: Synthetic oligonucleotide
agcagaaauaagcgugccguucagg

SEQ ID NO: 156411 - RNA, 25 nt, Artificial Sequence
  Description of Artificial Sequence: Synthetic oligonucleotide
aagcgugccguucaggguccagaag

SEQ ID NO: 156412 - RNA, 25 nt, Artificial Sequence
  Description of Artificial Sequence: Synthetic oligonucleotide
agaaacagucacucaagacugcuug

SEQ ID NO: 156413 - RNA, 25 nt, Artificial Sequence
  Description of Artificial Sequence: Synthetic oligonucleotide
agaggaagaagguccaugucuuugg

SEQ ID NO: 156414 - RNA, 25 nt, Artificial Sequence
  Description of Artificial Sequence: Synthetic oligonucleotide
uguauucaaaauaugccugaaacac

SEQ ID NO: 156415 - RNA, 25 nt, Artificial Sequence
  Description of Artificial Sequence: Synthetic oligonucleotide
auuuuccucccuuucucuguaccuc

SEQ ID NO: 156416 - RNA, 25 nt, Artificial Sequence
  Description of Artificial Sequence: Synthetic oligonucleotide
caaagaaagauagagcaagacaaga

SEQ ID NO: 156417 - RNA, 25 nt, Artificial Sequence
  Description of Artificial Sequence: Synthetic oligonucleotide
aagaaagauagagcaagacaagaaa

SEQ ID NO: 156418 - RNA, 25 nt, Artificial Sequence
  Description of Artificial Sequence: Synthetic oligonucleotide
gaaagcauuuguuuguacaagaucc

SEQ ID NO: 156419 - RNA, 25 nt, Artificial Sequence
  Description of Artificial Sequence: Synthetic oligonucleotide
ugaguuaaacgaacguacuugcaga

SEQ ID NO: 156420 - RNA, 25 nt, Artificial Sequence
  Description of Artificial Sequence: Synthetic oligonucleotide
acugauacagaacgaucgauacaga

SEQ ID NO: 156421 - RNA, 25 nt, Artificial Sequence
  Description of Artificial Sequence: Synthetic oligonucleotide
auauuauauauauauaaaaauaaau

SEQ ID NO: 156422 - RNA, 25 nt, Artificial Sequence
  Description of Artificial Sequence: Synthetic oligonucleotide
auuauauauauauaaaaauaaauau

SEQ ID NO: 156423 - RNA, 25 nt, Artificial Sequence
  Description of Artificial Sequence: Synthetic oligonucleotide
ucacuggauguauuugacugcugug

SEQ ID NO: 156424 - RNA, 25 nt, Artificial Sequence
  Description of Artificial Sequence: Synthetic oligonucleotide
cagggaagaggaggagaugagagac

SEQ ID NO: 156425 - RNA, 25 nt, Artificial Sequence
  Description of Artificial Sequence: Synthetic oligonucleotide
augaucuuuuuuuugucccacuugg

SEQ ID NO: 156426 - RNA, 27 nt, Artificial Sequence
  Description of Artificial Sequence: Synthetic oligonucleotide
ggccgugaacuccucaucaaaauaccu

SEQ ID NO: 156427 - RNA, 27 nt, Artificial Sequence
  Description of Artificial Sequence: Synthetic oligonucleotide
uggugugauggugaucaucugggccgu

SEQ ID NO: 156428 - RNA, 27 nt, Artificial Sequence
  Description of Artificial Sequence: Synthetic oligonucleotide
aaacccgcaggauaguuuucuucccua

SEQ ID NO: 156429 - RNA, 27 nt, Artificial Sequence
  Description of Artificial Sequence: Synthetic oligonucleotide
caaacuggaugaaauaaauuaaaaccc

SEQ ID NO: 156430 - RNA, 27 nt, Artificial Sequence
  Description of Artificial Sequence: Synthetic oligonucleotide
agaaguccuuaacauuucccuacguga

SEQ ID NO: 156431 - RNA, 27 nt, Artificial Sequence
  Description of Artificial Sequence: Synthetic oligonucleotide
cucugucccacuggguaaacccuggcc

SEQ ID NO: 156432 - RNA, 27 nt, Artificial Sequence
  Description of Artificial Sequence: Synthetic oligonucleotide
cacaauaacaaauuuaaaccuugcucc

SEQ ID NO: 156433 - RNA, 27 nt, Artificial Sequence
  Description of Artificial Sequence: Synthetic oligonucleotide
aaaugcauuugaacaacauaauacaca

SEQ ID NO: 156434 - RNA, 27 nt, Artificial Sequence
  Description of Artificial Sequence: Synthetic oligonucleotide
ggcuuuccugucacaaagauuaaaaac

SEQ ID NO: 156435 - RNA, 27 nt, Artificial Sequence
  Description of Artificial Sequence: Synthetic oligonucleotide
agggcuuuccugucacaaagauuaaaa

SEQ ID NO: 156436 - RNA, 27 nt, Artificial Sequence
  Description of Artificial Sequence: Synthetic oligonucleotide
ggccaugcugggagacauaagcagcag

SEQ ID NO: 156437 - RNA, 27 nt, Artificial Sequence
  Description of Artificial Sequence: Synthetic oligonucleotide
ucagggagaagcuucugaaacacuucu

SEQ ID NO: 156438 - RNA, 27 nt, Artificial Sequence
  Description of Artificial Sequence: Synthetic oligonucleotide
aagggcuucuuccuuauugauggucag

SEQ ID NO: 156439 - RNA, 27 nt, Artificial Sequence
  Description of Artificial Sequence: Synthetic oligonucleotide
ugaagggcuucuuccuuauugaugguc

SEQ ID NO: 156440 - RNA, 27 nt, Artificial Sequence
  Description of Artificial Sequence: Synthetic oligonucleotide
cgcugaagggcuucuuccuuauugaug

SEQ ID NO: 156441 - RNA, 27 nt, Artificial Sequence
  Description of Artificial Sequence: Synthetic oligonucleotide
gccgcugaagggcuucuuccuuauuga

SEQ ID NO: 156442 - RNA, 27 nt, Artificial Sequence
  Description of Artificial Sequence: Synthetic oligonucleotide
acuggccgcugaagggcuucuuccuua

SEQ ID NO: 156443 - RNA, 27 nt, Artificial Sequence
  Description of Artificial Sequence: Synthetic oligonucleotide
cggagcuuuucaccuuuaguuaugcuu

SEQ ID NO: 156444 - RNA, 27 nt, Artificial Sequence
  Description of Artificial Sequence: Synthetic oligonucleotide
ccggagcuuuucaccuuuaguuaugcu

SEQ ID NO: 156445 - RNA, 27 nt, Artificial Sequence
  Description of Artificial Sequence: Synthetic oligonucleotide
cagacuguugacuggcgugauguaguu

SEQ ID NO: 156446 - RNA, 27 nt, Artificial Sequence
  Description of Artificial Sequence: Synthetic oligonucleotide
cuuuugaacucugcuuaaauccagugg

SEQ ID NO: 156447 - RNA, 27 nt, Artificial Sequence
  Description of Artificial Sequence: Synthetic oligonucleotide
gcuuuugaacucugcuuaaauccagug

SEQ ID NO: 156448 - RNA, 27 nt, Artificial Sequence
  Description of Artificial Sequence: Synthetic oligonucleotide
agggcuuuugaacucugcuuaaaucca

SEQ ID NO: 156449 - RNA, 27 nt, Artificial Sequence
  Description of Artificial Sequence: Synthetic oligonucleotide
aagggcuuuugaacucugcuuaaaucc

SEQ ID NO: 156450 - RNA, 27 nt, Artificial Sequence
  Description of Artificial Sequence: Synthetic oligonucleotide
ugaagggcuuuugaacucugcuuaaau

SEQ ID NO: 156451 - RNA, 27 nt, Artificial Sequence
  Description of Artificial Sequence: Synthetic oligonucleotide
cugaagggcuuuugaacucugcuuaaa

SEQ ID NO: 156452 - RNA, 27 nt, Artificial Sequence
  Description of Artificial Sequence: Synthetic oligonucleotide
cgcugaagggcuuuugaacucugcuua

SEQ ID NO: 156453 - RNA, 27 nt, Artificial Sequence
  Description of Artificial Sequence: Synthetic oligonucleotide
cgagcggcuucacucagacccugaggc

SEQ ID NO: 156454 - RNA, 27 nt, Artificial Sequence
  Description of Artificial Sequence: Synthetic oligonucleotide
uugacuggcgugauguaguugcuuggg

SEQ ID NO: 156455 - RNA, 27 nt, Artificial Sequence
  Description of Artificial Sequence: Synthetic oligonucleotide
cacgcaccaagaagcugccauugaucc

SEQ ID NO: 156456 - RNA, 27 nt, Artificial Sequence
  Description of Artificial Sequence: Synthetic oligonucleotide
cugaugaauccaaugugggcuggaauc

SEQ ID NO: 156457 - RNA, 27 nt, Artificial Sequence
  Description of Artificial Sequence: Synthetic oligonucleotide
cuuagguauuccacauucucagcugug

SEQ ID NO: 156458 - RNA, 27 nt, Artificial Sequence
  Description of Artificial Sequence: Synthetic oligonucleotide
ugagccucaaauuaggagauacguuuu

SEQ ID NO: 156459 - RNA, 27 nt, Artificial Sequence
  Description of Artificial Sequence: Synthetic oligonucleotide
ccaauuguagagaaauuauuuuaggaa

SEQ ID NO: 156460 - RNA, 27 nt, Artificial Sequence
  Description of Artificial Sequence: Synthetic oligonucleotide
ggcuccuaacuagcugaaucuuccaau

SEQ ID NO: 156461 - RNA, 27 nt, Artificial Sequence
  Description of Artificial Sequence: Synthetic oligonucleotide
guggauauugacuaggagaguuuaaaa

SEQ ID NO: 156462 - RNA, 27 nt, Artificial Sequence
  Description of Artificial Sequence: Synthetic oligonucleotide
ugugacugaacauaacuguaggcugaa

SEQ ID NO: 156463 - RNA, 27 nt, Artificial Sequence
  Description of Artificial Sequence: Synthetic oligonucleotide
guaugugugugugacugaacauaacug

SEQ ID NO: 156464 - RNA, 27 nt, Artificial Sequence
  Description of Artificial Sequence: Synthetic oligonucleotide
aagcaaaaggaacauuuuguaugugug

SEQ ID NO: 156465 - RNA, 27 nt, Artificial Sequence
  Description of Artificial Sequence: Synthetic oligonucleotide
aaaaauuacuuuaaaagcaaaaggaac

SEQ ID NO: 156466 - RNA, 27 nt, Artificial Sequence
  Description of Artificial Sequence: Synthetic oligonucleotide
ccauugacuguugcuucacaggucaga

SEQ ID NO: 156467 - RNA, 27 nt, Artificial Sequence
  Description of Artificial Sequence: Synthetic oligonucleotide
auugguuugucgaugugugagauaguu

SEQ ID NO: 156468 - RNA, 27 nt, Artificial Sequence
  Description of Artificial Sequence: Synthetic oligonucleotide
agugguagcaguacaauugaggacaag

SEQ ID NO: 156469 - RNA, 27 nt, Artificial Sequence
  Description of Artificial Sequence: Synthetic oligonucleotide
uaagaccgcuugccagcuacgguuuca

SEQ ID NO: 156470 - RNA, 27 nt, Artificial Sequence
  Description of Artificial Sequence: Synthetic oligonucleotide
agccgguaagaccgcuugccagcuacg

SEQ ID NO: 156471 - RNA, 27 nt, Artificial Sequence
  Description of Artificial Sequence: Synthetic oligonucleotide
gguaacccaucuuuuaaccauacaacu

SEQ ID NO: 156472 - RNA, 27 nt, Artificial Sequence
  Description of Artificial Sequence: Synthetic oligonucleotide
ucgcagguaacccaucuuuuaaccaua

SEQ ID NO: 156473 - RNA, 27 nt, Artificial Sequence
  Description of Artificial Sequence: Synthetic oligonucleotide
cucagcaagauuguauaauucccugca

SEQ ID NO: 156474 - RNA, 27 nt, Artificial Sequence
  Description of Artificial Sequence: Synthetic oligonucleotide
acuguuuuaugcucagcaagauuguau

SEQ ID NO: 156475 - RNA, 27 nt, Artificial Sequence
  Description of Artificial Sequence: Synthetic oligonucleotide
aggauaaaggacucuucauuauuggaa

SEQ ID NO: 156476 - RNA, 27 nt, Artificial Sequence
  Description of Artificial Sequence: Synthetic oligonucleotide
caacuugcguuggaacauccaaagugu

SEQ ID NO: 156477 - RNA, 27 nt, Artificial Sequence
  Description of Artificial Sequence: Synthetic oligonucleotide
augguuucaguuuaguggaagcauuua

SEQ ID NO: 156478 - RNA, 27 nt, Artificial Sequence
  Description of Artificial Sequence: Synthetic oligonucleotide
auauuuaacaaagucaaacuuucucac

SEQ ID NO: 156479 - RNA, 27 nt, Artificial Sequence
  Description of Artificial Sequence: Synthetic oligonucleotide
aacuuuuaauauacaguaguucuuuuc

SEQ ID NO: 156480 - RNA, 27 nt, Artificial Sequence
  Description of Artificial Sequence: Synthetic oligonucleotide
guuaagucaaaacccguauuucuaaag

SEQ ID NO: 156481 - RNA, 27 nt, Artificial Sequence
  Description of Artificial Sequence: Synthetic oligonucleotide
gugcugaguuugcuguacccauguuga

SEQ ID NO: 156482 - RNA, 27 nt, Artificial Sequence
  Description of Artificial Sequence: Synthetic oligonucleotide
ugaggucagcaucuucugugucuuuac

SEQ ID NO: 156483 - RNA, 27 nt, Artificial Sequence
  Description of Artificial Sequence: Synthetic oligonucleotide
gcgaucugaauaaaccucccuacuagc

SEQ ID NO: 156484 - RNA, 27 nt, Artificial Sequence
  Description of Artificial Sequence: Synthetic oligonucleotide
aucccagaacccugcugcagaaggcca

SEQ ID NO: 156485 - RNA, 27 nt, Artificial Sequence
  Description of Artificial Sequence: Synthetic oligonucleotide
cauaauuuccaauauguaccagaccuu

SEQ ID NO: 156486 - RNA, 27 nt, Artificial Sequence
  Description of Artificial Sequence: Synthetic oligonucleotide
cuagugcuuccaucggaaggacuaggu

SEQ ID NO: 156487 - RNA, 27 nt, Artificial Sequence
  Description of Artificial Sequence: Synthetic oligonucleotide
uccacauaaaaacaauauucacuggga

SEQ ID NO: 156488 - RNA, 27 nt, Artificial Sequence
  Description of Artificial Sequence: Synthetic oligonucleotide
ucuaccaauuccaacuugaauucauug

SEQ ID NO: 156489 - RNA, 27 nt, Artificial Sequence
  Description of Artificial Sequence: Synthetic oligonucleotide
ucuccaagucuaaaucuguguccugag

SEQ ID NO: 156490 - RNA, 27 nt, Artificial Sequence
  Description of Artificial Sequence: Synthetic oligonucleotide
uggaauacuguaacugugcuuugagga

SEQ ID NO: 156491 - RNA, 27 nt, Artificial Sequence
  Description of Artificial Sequence: Synthetic oligonucleotide
uuaauucaucagugguggcagugguag

SEQ ID NO: 156492 - RNA, 27 nt, Artificial Sequence
  Description of Artificial Sequence: Synthetic oligonucleotide
gugaugauguggcacuaguaguuucuu

SEQ ID NO: 156493 - RNA, 27 nt, Artificial Sequence
  Description of Artificial Sequence: Synthetic oligonucleotide
ucuguuuggugaggcuguccgacuuug

SEQ ID NO: 156494 - RNA, 27 nt, Artificial Sequence
  Description of Artificial Sequence: Synthetic oligonucleotide
ccaucauguuccauuuuucgcuuucuc

SEQ ID NO: 156495 - RNA, 27 nt, Artificial Sequence
  Description of Artificial Sequence: Synthetic oligonucleotide
gcagucuacaugcuaaaucagagggua

SEQ ID NO: 156496 - RNA, 27 nt, Artificial Sequence
  Description of Artificial Sequence: Synthetic oligonucleotide
cauaaauagauccuuaaauagcucaaa

SEQ ID NO: 156497 - RNA, 27 nt, Artificial Sequence
  Description of Artificial Sequence: Synthetic oligonucleotide
ugauaauagugcuuuuucaccuuuuuc

SEQ ID NO: 156498 - RNA, 27 nt, Artificial Sequence
  Description of Artificial Sequence: Synthetic oligonucleotide
gcagaacugauaauagugcuuuuucac

SEQ ID NO: 156499 - RNA, 27 nt, Artificial Sequence
  Description of Artificial Sequence: Synthetic oligonucleotide
guagguuuaaucuuucuuuucagccau

SEQ ID NO: 156500 - RNA, 27 nt, Artificial Sequence
  Description of Artificial Sequence: Synthetic oligonucleotide
agaaggauuuuauuauaaggguuuaau

SEQ ID NO: 156501 - RNA, 27 nt, Artificial Sequence
  Description of Artificial Sequence: Synthetic oligonucleotide
gucuacagcauuggcuaauaguaugaa

SEQ ID NO: 156502 - RNA, 27 nt, Artificial Sequence
  Description of Artificial Sequence: Synthetic oligonucleotide
cuauuccuaucaaaaugcuucugucua

SEQ ID NO: 156503 - RNA, 27 nt, Artificial Sequence
  Description of Artificial Sequence: Synthetic oligonucleotide
ucagggccauuaucuuauuugcucuau

SEQ ID NO: 156504 - RNA, 27 nt, Artificial Sequence
  Description of Artificial Sequence: Synthetic oligonucleotide
ugcuugaggaagagaaaaauguugguc

SEQ ID NO: 156505 - RNA, 27 nt, Artificial Sequence
  Description of Artificial Sequence: Synthetic oligonucleotide
ugggcugaacuuuucucauacuuaaag

SEQ ID NO: 156506 - RNA, 27 nt, Artificial Sequence
  Description of Artificial Sequence: Synthetic oligonucleotide
gguucagcagccaucuuuauuccugcg

SEQ ID NO: 156507 - RNA, 27 nt, Artificial Sequence
  Description of Artificial Sequence: Synthetic oligonucleotide
ugaagagaacuuggucauucaaauuuc

SEQ ID NO: 156508 - RNA, 27 nt, Artificial Sequence
  Description of Artificial Sequence: Synthetic oligonucleotide
cucuaggcuggcuaucuuuauacauac

SEQ ID NO: 156509 - RNA, 27 nt, Artificial Sequence
  Description of Artificial Sequence: Synthetic oligonucleotide
acacuucacagagauaguuacagccau

SEQ ID NO: 156510 - RNA, 27 nt, Artificial Sequence
  Description of Artificial Sequence: Synthetic oligonucleotide
uugaaauuuucucacacuucacagaga

SEQ ID NO: 156511 - RNA, 27 nt, Artificial Sequence
  Description of Artificial Sequence: Synthetic oligonucleotide
ucaggaggauucauuuccuuaaaggaa

SEQ ID NO: 156512 - RNA, 27 nt, Artificial Sequence
  Description of Artificial Sequence: Synthetic oligonucleotide
auaugaugucacuuuuuguauccuuga

SEQ ID NO: 156513 - RNA, 27 nt, Artificial Sequence
  Description of Artificial Sequence: Synthetic oligonucleotide
uaugaugaagauucaaauugcaucuua

SEQ ID NO: 156514 - RNA, 27 nt, Artificial Sequence
  Description of Artificial Sequence: Synthetic oligonucleotide
uuaauagcuagucuucguuuugaacag

SEQ ID NO: 156515 - RNA, 27 nt, Artificial Sequence
  Description of Artificial Sequence: Synthetic oligonucleotide
auuuuuaguagagaugagguuucacca

SEQ ID NO: 156516 - RNA, 27 nt, Artificial Sequence
  Description of Artificial Sequence: Synthetic oligonucleotide
aggcgagauagagcuucucuuucguuc

SEQ ID NO: 156517 - RNA, 27 nt, Artificial Sequence
  Description of Artificial Sequence: Synthetic oligonucleotide
aacuggaccgaaggcgcuuguggagaa

SEQ ID NO: 156518 - RNA, 27 nt, Artificial Sequence
  Description of Artificial Sequence: Synthetic oligonucleotide
gcggcuacaucuuuggaaucuucuccu

SEQ ID NO: 156519 - RNA, 27 nt, Artificial Sequence
  Description of Artificial Sequence: Synthetic oligonucleotide
caagucuccucauugaauccagauugg

SEQ ID NO: 156520 - RNA, 27 nt, Artificial Sequence
  Description of Artificial Sequence: Synthetic oligonucleotide
uccucacuacucucaaaucuguucugg

SEQ ID NO: 156521 - RNA, 27 nt, Artificial Sequence
  Description of Artificial Sequence: Synthetic oligonucleotide
uuuguacucaucugcacagcucuggcu

SEQ ID NO: 156522 - RNA, 27 nt, Artificial Sequence
  Description of Artificial Sequence: Synthetic oligonucleotide
gcccauuaacaacaacaaucugaggug

SEQ ID NO: 156523 - RNA, 27 nt, Artificial Sequence
  Description of Artificial Sequence: Synthetic oligonucleotide
aauaaauuaaaaauaauuaaaauagug

SEQ ID NO: 156524 - RNA, 27 nt, Artificial Sequence
  Description of Artificial Sequence: Synthetic oligonucleotide
cauauuuaaauauuaauaaauuaaaaa

SEQ ID NO: 156525 - RNA, 27 nt, Artificial Sequence
  Description of Artificial Sequence: Synthetic oligonucleotide
gaaacaaaggauauucaaacugcauag

SEQ ID NO: 156526 - RNA, 27 nt, Artificial Sequence
  Description of Artificial Sequence: Synthetic oligonucleotide
caaacacuuagacgccagcagcauggg

SEQ ID NO: 156527 - RNA, 27 nt, Artificial Sequence
  Description of Artificial Sequence: Synthetic oligonucleotide
uuugucacaggugaaaugcacaucuga

SEQ ID NO: 156528 - RNA, 27 nt, Artificial Sequence
  Description of Artificial Sequence: Synthetic oligonucleotide
uaauucagccuggcacagguuuugauc

SEQ ID NO: 156529 - RNA, 27 nt, Artificial Sequence
  Description of Artificial Sequence: Synthetic oligonucleotide
auuguaagaaugacuacccacauucac

SEQ ID NO: 156530 - RNA, 27 nt, Artificial Sequence
  Description of Artificial Sequence: Synthetic oligonucleotide
caauuguaagaaugacuacccacauuc

SEQ ID NO: 156531 - RNA, 27 nt, Artificial Sequence
  Description of Artificial Sequence: Synthetic oligonucleotide
guacacucucugaugcucauuuucaua

SEQ ID NO: 156532 - RNA, 27 nt, Artificial Sequence
  Description of Artificial Sequence: Synthetic oligonucleotide
cugcugaguucuacaugaaaagcaaau

SEQ ID NO: 156533 - RNA, 27 nt, Artificial Sequence
  Description of Artificial Sequence: Synthetic oligonucleotide
uacugaaaauaaauauagaaauacaac

SEQ ID NO: 156534 - RNA, 27 nt, Artificial Sequence
  Description of Artificial Sequence: Synthetic oligonucleotide
uuccauuuaagaaacauuaaucaaaac

SEQ ID NO: 156535 - RNA, 27 nt, Artificial Sequence
  Description of Artificial Sequence: Synthetic oligonucleotide
acaauuuuaggcacuauacacguuguu

SEQ ID NO: 156536 - RNA, 27 nt, Artificial Sequence
  Description of Artificial Sequence: Synthetic oligonucleotide
ccagauguuaguagccaaggauauggu

SEQ ID NO: 156537 - RNA, 27 nt, Artificial Sequence
  Description of Artificial Sequence: Synthetic oligonucleotide
agcucacagucuccagauguuaguagc

SEQ ID NO: 156538 - RNA, 27 nt, Artificial Sequence
  Description of Artificial Sequence: Synthetic oligonucleotide
auuaauaaaaagcacacaacuuauggc

SEQ ID NO: 156539 - RNA, 27 nt, Artificial Sequence
  Description of Artificial Sequence: Synthetic oligonucleotide
aauguaagaagagccaaaaugaugcau

SEQ ID NO: 156540 - RNA, 27 nt, Artificial Sequence
  Description of Artificial Sequence: Synthetic oligonucleotide
acauuuuuacaaauguaagaagagcca

SEQ ID NO: 156541 - RNA, 27 nt, Artificial Sequence
  Description of Artificial Sequence: Synthetic oligonucleotide
aauaugaauuaagaugaccuaaucugu

SEQ ID NO: 156542 - RNA, 27 nt, Artificial Sequence
  Description of Artificial Sequence: Synthetic oligonucleotide
ucaugauuaguucuuucaauuccaucc

SEQ ID NO: 156543 - RNA, 27 nt, Artificial Sequence
  Description of Artificial Sequence: Synthetic oligonucleotide
cccaagagcagaaggaaugagugugca

SEQ ID NO: 156544 - RNA, 27 nt, Artificial Sequence
  Description of Artificial Sequence: Synthetic oligonucleotide
cucaaagcuacugguuaccucuacacc

SEQ ID NO: 156545 - RNA, 27 nt, Artificial Sequence
  Description of Artificial Sequence: Synthetic oligonucleotide
ugaaauauuacguggcaugugguuggg

SEQ ID NO: 156546 - RNA, 27 nt, Artificial Sequence
  Description of Artificial Sequence: Synthetic oligonucleotide
agugaagagaauaacuuguuuccgaag

SEQ ID NO: 156547 - RNA, 27 nt, Artificial Sequence
  Description of Artificial Sequence: Synthetic oligonucleotide
uuucuuagcauuaguuauugggaguga

SEQ ID NO: 156548 - RNA, 27 nt, Artificial Sequence
  Description of Artificial Sequence: Synthetic oligonucleotide
uugauuuucagcauuucuuagcauuag

SEQ ID NO: 156549 - RNA, 27 nt, Artificial Sequence
  Description of Artificial Sequence: Synthetic oligonucleotide
aaaguaaucauauuuagagaaagacag

SEQ ID NO: 156550 - RNA, 27 nt, Artificial Sequence
  Description of Artificial Sequence: Synthetic oligonucleotide
uguagaacaaaaugccugaaauucagc

SEQ ID NO: 156551 - RNA, 27 nt, Artificial Sequence
  Description of Artificial Sequence: Synthetic oligonucleotide
gagagucccgggugagagggaaucgcc

SEQ ID NO: 156552 - RNA, 27 nt, Artificial Sequence
  Description of Artificial Sequence: Synthetic oligonucleotide
cuuuacuuuaaagguucacuuuccuug

SEQ ID NO: 156553 - RNA, 27 nt, Artificial Sequence
  Description of Artificial Sequence: Synthetic oligonucleotide
ccaggcuuccagagcaugcagccuccu

SEQ ID NO: 156554 - RNA, 27 nt, Artificial Sequence
  Description of Artificial Sequence: Synthetic oligonucleotide
cucucuuuuguuuucuguucagagaaa

SEQ ID NO: 156555 - RNA, 27 nt, Artificial Sequence
  Description of Artificial Sequence: Synthetic oligonucleotide
cggcauaacugauuacagccaaguuca

SEQ ID NO: 156556 - RNA, 27 nt, Artificial Sequence
  Description of Artificial Sequence: Synthetic oligonucleotide
uggacuucuuuuaauuuuggcuucuuc

SEQ ID NO: 156557 - RNA, 27 nt, Artificial Sequence
  Description of Artificial Sequence: Synthetic oligonucleotide
uaaccucaccuggacuucuuuuaauuu

SEQ ID NO: 156558 - RNA, 27 nt, Artificial Sequence
  Description of Artificial Sequence: Synthetic oligonucleotide
guccucuucccgauaauccggauucag

SEQ ID NO: 156559 - RNA, 27 nt, Artificial Sequence
  Description of Artificial Sequence: Synthetic oligonucleotide
acaauacuugcuuugaugucacauuaa

SEQ ID NO: 156560 - RNA, 27 nt, Artificial Sequence
  Description of Artificial Sequence: Synthetic oligonucleotide
gagugcuacaauacuugcuuugauguc

SEQ ID NO: 156561 - RNA, 27 nt, Artificial Sequence
  Description of Artificial Sequence: Synthetic oligonucleotide
auuugugguuuuguuuucucucucucu

SEQ ID NO: 156562 - RNA, 27 nt, Artificial Sequence
  Description of Artificial Sequence: Synthetic oligonucleotide
uguaugggcuuaaauacuacagcgagg

SEQ ID NO: 156563 - RNA, 27 nt, Artificial Sequence
  Description of Artificial Sequence: Synthetic oligonucleotide
cuguaugggcuuaaauacuacagcgag

SEQ ID NO: 156564 - RNA, 27 nt, Artificial Sequence
  Description of Artificial Sequence: Synthetic oligonucleotide
ggaagguuucuguaugggcuuaaauac

SEQ ID NO: 156565 - RNA, 27 nt, Artificial Sequence
  Description of Artificial Sequence: Synthetic oligonucleotide
guagguauaccauguuuauuuuaauac

SEQ ID NO: 156566 - RNA, 27 nt, Artificial Sequence
  Description of Artificial Sequence: Synthetic oligonucleotide
uccgaaaacuggccgaucagaacagcc

SEQ ID NO: 156567 - RNA, 27 nt, Artificial Sequence
  Description of Artificial Sequence: Synthetic oligonucleotide
cccuguuccaaaguucaaauuauuugu

SEQ ID NO: 156568 - RNA, 27 nt, Artificial Sequence
  Description of Artificial Sequence: Synthetic oligonucleotide
acuggaaaguuaaauuaaggucgcaau

SEQ ID NO: 156569 - RNA, 27 nt, Artificial Sequence
  Description of Artificial Sequence: Synthetic oligonucleotide
caaaaccaaacuuuagcuuucucagcc

SEQ ID NO: 156570 - RNA, 27 nt, Artificial Sequence
  Description of Artificial Sequence: Synthetic oligonucleotide
uacagugggaaguagcaucuuuacuuu

SEQ ID NO: 156571 - RNA, 27 nt, Artificial Sequence
  Description of Artificial Sequence: Synthetic oligonucleotide
ucauaugguaucagcaauuaagcagua

SEQ ID NO: 156572 - RNA, 27 nt, Artificial Sequence
  Description of Artificial Sequence: Synthetic oligonucleotide
cagcccauguuucauucauaugguauc

SEQ ID NO: 156573 - RNA, 27 nt, Artificial Sequence
  Description of Artificial Sequence: Synthetic oligonucleotide
uaugaaaaaguuggauaagaaaguugg

SEQ ID NO: 156574 - RNA, 27 nt, Artificial Sequence
  Description of Artificial Sequence: Synthetic oligonucleotide
uccggccucaugaugucaugcaaggcu

SEQ ID NO: 156575 - RNA, 27 nt, Artificial Sequence
  Description of Artificial Sequence: Synthetic oligonucleotide
acaaaugcagucauauacaaauucagg

SEQ ID NO: 156576 - RNA, 27 nt, Artificial Sequence
  Description of Artificial Sequence: Synthetic oligonucleotide
gguaguaaacauucuacuaggauucuu

SEQ ID NO: 156577 - RNA, 27 nt, Artificial Sequence
  Description of Artificial Sequence: Synthetic oligonucleotide
uuucaucaaaaaauucuucccuuucug

SEQ ID NO: 156578 - RNA, 27 nt, Artificial Sequence
  Description of Artificial Sequence: Synthetic oligonucleotide
aaauucacacacuggcaugccgauagc

SEQ ID NO: 156579 - RNA, 27 nt, Artificial Sequence
  Description of Artificial Sequence: Synthetic oligonucleotide
acauacauugcucuacuaugaggugaa

SEQ ID NO: 156580 - RNA, 27 nt, Artificial Sequence
  Description of Artificial Sequence: Synthetic oligonucleotide
uauauaugugcuuuggcaauucuggug

SEQ ID NO: 156581 - RNA, 27 nt, Artificial Sequence
  Description of Artificial Sequence: Synthetic oligonucleotide
ggagaaacuauuacccagaucaccacu

SEQ ID NO: 156582 - RNA, 27 nt, Artificial Sequence
  Description of Artificial Sequence: Synthetic oligonucleotide
auuuggagaaacuauuacccagaucac

SEQ ID NO: 156583 - RNA, 27 nt, Artificial Sequence
  Description of Artificial Sequence: Synthetic oligonucleotide
uuucuaggaaguauucaucacauccac

SEQ ID NO: 156584 - RNA, 27 nt, Artificial Sequence
  Description of Artificial Sequence: Synthetic oligonucleotide
cauauaugguguagcuguggaaaugcg

SEQ ID NO: 156585 - RNA, 27 nt, Artificial Sequence
  Description of Artificial Sequence: Synthetic oligonucleotide
cuccauucauauaugguguagcugugg

SEQ ID NO: 156586 - RNA, 27 nt, Artificial Sequence
  Description of Artificial Sequence: Synthetic oligonucleotide
aucuucuucucguguaagaacugcagc

SEQ ID NO: 156587 - RNA, 27 nt, Artificial Sequence
  Description of Artificial Sequence: Synthetic oligonucleotide
ucccuguaaaugaucuucuucucgugu

SEQ ID NO: 156588 - RNA, 27 nt, Artificial Sequence
  Description of Artificial Sequence: Synthetic oligonucleotide
gucccuguaaaugaucuucuucucgug

SEQ ID NO: 156589 - RNA, 27 nt, Artificial Sequence
  Description of Artificial Sequence: Synthetic oligonucleotide
ucaggucccuguaaaugaucuucuucu

SEQ ID NO: 156590 - RNA, 27 nt, Artificial Sequence
  Description of Artificial Sequence: Synthetic oligonucleotide
gaugcagucaaacaccucuuccucugu

SEQ ID NO: 156591 - RNA, 27 nt, Artificial Sequence
  Description of Artificial Sequence: Synthetic oligonucleotide
cgaugcagucaaacaccucuuccucug

SEQ ID NO: 156592 - RNA, 27 nt, Artificial Sequence
  Description of Artificial Sequence: Synthetic oligonucleotide
cccugugaacucgcccucaaaguagcg

SEQ ID NO: 156593 - RNA, 27 nt, Artificial Sequence
  Description of Artificial Sequence: Synthetic oligonucleotide
ggacagaggugccaggagaugcccuca

SEQ ID NO: 156594 - RNA, 27 nt, Artificial Sequence
  Description of Artificial Sequence: Synthetic oligonucleotide
uuaaaaagacaaaccauaucacuccuu

SEQ ID NO: 156595 - RNA, 27 nt, Artificial Sequence
  Description of Artificial Sequence: Synthetic oligonucleotide
cuuaaaaagacaaaccauaucacuccu

SEQ ID NO: 156596 - RNA, 27 nt, Artificial Sequence
  Description of Artificial Sequence: Synthetic oligonucleotide
gacaaccuuuaggaucuuuacugcaac

SEQ ID NO: 156597 - RNA, 27 nt, Artificial Sequence
  Description of Artificial Sequence: Synthetic oligonucleotide
gucgacaaccuuuaggaucuuuacugc

SEQ ID NO: 156598 - RNA, 27 nt, Artificial Sequence
  Description of Artificial Sequence: Synthetic oligonucleotide
acaauugccagguuguccuuugucaug

SEQ ID NO: 156599 - RNA, 27 nt, Artificial Sequence
  Description of Artificial Sequence: Synthetic oligonucleotide
ccucgcaccacugggucacaauugcca

SEQ ID NO: 156600 - RNA, 27 nt, Artificial Sequence
  Description of Artificial Sequence: Synthetic oligonucleotide
auuucaugucucuauggaugauguucu

SEQ ID NO: 156601 - RNA, 27 nt, Artificial Sequence
  Description of Artificial Sequence: Synthetic oligonucleotide
uggagaaauauauuguuggauuucaug

SEQ ID NO: 156602 - RNA, 27 nt, Artificial Sequence
  Description of Artificial Sequence: Synthetic oligonucleotide
agccuucauggagaaauauauuguugg

SEQ ID NO: 156603 - RNA, 27 nt, Artificial Sequence
  Description of Artificial Sequence: Synthetic oligonucleotide
accacuccagcgugacuuuacuguugc

SEQ ID NO: 156604 - RNA, 27 nt, Artificial Sequence
  Description of Artificial Sequence: Synthetic oligonucleotide
ccucucuuccuuuacuuucuucacaca

SEQ ID NO: 156605 - RNA, 27 nt, Artificial Sequence
  Description of Artificial Sequence: Synthetic oligonucleotide
gcccgaugcaaggauggcucggaagcg

SEQ ID NO: 156606 - RNA, 27 nt, Artificial Sequence
  Description of Artificial Sequence: Synthetic oligonucleotide
cacaguaggauauucaaccuccauuuc

SEQ ID NO: 156607 - RNA, 27 nt, Artificial Sequence
  Description of Artificial Sequence: Synthetic oligonucleotide
uuacacaguaggauauucaaccuccau

SEQ ID NO: 156608 - RNA, 27 nt, Artificial Sequence
  Description of Artificial Sequence: Synthetic oligonucleotide
uacacuacaagggaaaacucaaaaucu

SEQ ID NO: 156609 - RNA, 27 nt, Artificial Sequence
  Description of Artificial Sequence: Synthetic oligonucleotide
caaucaacaaagaacaaacaggauaaa

SEQ ID NO: 156610 - RNA, 27 nt, Artificial Sequence
  Description of Artificial Sequence: Synthetic oligonucleotide
uuucaaucaacaaagaacaaacaggau

SEQ ID NO: 156611 - RNA, 27 nt, Artificial Sequence
  Description of Artificial Sequence: Synthetic oligonucleotide
auggaagaaaaagaaggcuguagagaa

SEQ ID NO: 156612 - RNA, 27 nt, Artificial Sequence
  Description of Artificial Sequence: Synthetic oligonucleotide
uagaaggaagauuagcuauggaagaaa

SEQ ID NO: 156613 - RNA, 27 nt, Artificial Sequence
  Description of Artificial Sequence: Synthetic oligonucleotide
augaagcauucaacaggaagauuauuu

SEQ ID NO: 156614 - RNA, 27 nt, Artificial Sequence
  Description of Artificial Sequence: Synthetic oligonucleotide
caugaagcauucaacaggaagauuauu

SEQ ID NO: 156615 - RNA, 27 nt, Artificial Sequence
  Description of Artificial Sequence: Synthetic oligonucleotide
ucaaaguagaauucaagucaugaagca

SEQ ID NO: 156616 - RNA, 27 nt, Artificial Sequence
  Description of Artificial Sequence: Synthetic oligonucleotide
gucuguaguugcuucucucccucuuag

SEQ ID NO: 156617 - RNA, 27 nt, Artificial Sequence
  Description of Artificial Sequence: Synthetic oligonucleotide
guugaccuuggucugguaggagacggc

SEQ ID NO: 156618 - RNA, 27 nt, Artificial Sequence
  Description of Artificial Sequence: Synthetic oligonucleotide
gucgagauagucgggccgauugaucuc

SEQ ID NO: 156619 - RNA, 27 nt, Artificial Sequence
  Description of Artificial Sequence: Synthetic oligonucleotide
guuugggaagguuggauguucguccuc

SEQ ID NO: 156620 - RNA, 27 nt, Artificial Sequence
  Description of Artificial Sequence: Synthetic oligonucleotide
aguucuaagcuuggguuccgacccuaa

SEQ ID NO: 156621 - RNA, 27 nt, Artificial Sequence
  Description of Artificial Sequence: Synthetic oligonucleotide
uuaaaguucuaagcuuggguuccgacc

SEQ ID NO: 156622 - RNA, 27 nt, Artificial Sequence
  Description of Artificial Sequence: Synthetic oligonucleotide
guugcuuaaaguucuaagcuuggguuc

SEQ ID NO: 156623 - RNA, 27 nt, Artificial Sequence
  Description of Artificial Sequence: Synthetic oligonucleotide
gugguggucuuguugcuuaaaguucua

SEQ ID NO: 156624 - RNA, 27 nt, Artificial Sequence
  Description of Artificial Sequence: Synthetic oligonucleotide
acuuuauuucucgccacugaauaguag

SEQ ID NO: 156625 - RNA, 27 nt, Artificial Sequence
  Description of Artificial Sequence: Synthetic oligonucleotide
aacuuuauuucucgccacugaauagua

SEQ ID NO: 156626 - RNA, 27 nt, Artificial Sequence
  Description of Artificial Sequence: Synthetic oligonucleotide
ggaucauuuccuguuaucuguguuugu

SEQ ID NO: 156627 - RNA, 27 nt, Artificial Sequence
  Description of Artificial Sequence: Synthetic oligonucleotide
guuucauuucuucucuuuucuuaaggc

SEQ ID NO: 156628 - RNA, 27 nt, Artificial Sequence
  Description of Artificial Sequence: Synthetic oligonucleotide
ggaggauggaaacacacuccuucaguu

SEQ ID NO: 156629 - RNA, 27 nt, Artificial Sequence
  Description of Artificial Sequence: Synthetic oligonucleotide
ucaaagauuuucagucccgcggugaca

SEQ ID NO: 156630 - RNA, 27 nt, Artificial Sequence
  Description of Artificial Sequence: Synthetic oligonucleotide
ccugaacggcacgcuuauuucugcugu

SEQ ID NO: 156631 - RNA, 27 nt, Artificial Sequence
  Description of Artificial Sequence: Synthetic oligonucleotide
cuucuggacccugaacggcacgcuuau

SEQ ID NO: 156632 - RNA, 27 nt, Artificial Sequence
  Description of Artificial Sequence: Synthetic oligonucleotide
caagcagucuugagugacuguuucuuc

SEQ ID NO: 156633 - RNA, 27 nt, Artificial Sequence
  Description of Artificial Sequence: Synthetic oligonucleotide
ccaaagacauggaccuucuuccucuga

SEQ ID NO: 156634 - RNA, 27 nt, Artificial Sequence
  Description of Artificial Sequence: Synthetic oligonucleotide
guguuucaggcauauuuugaauacauc

SEQ ID NO: 156635 - RNA, 27 nt, Artificial Sequence
  Description of Artificial Sequence: Synthetic oligonucleotide
gagguacagagaaagggaggaaaauag

SEQ ID NO: 156636 - RNA, 27 nt, Artificial Sequence
  Description of Artificial Sequence: Synthetic oligonucleotide
ucuugucuugcucuaucuuucuuuggu

SEQ ID NO: 156637 - RNA, 27 nt, Artificial Sequence
  Description of Artificial Sequence: Synthetic oligonucleotide
uuucuugucuugcucuaucuuucuuug

SEQ ID NO: 156638 - RNA, 27 nt, Artificial Sequence
  Description of Artificial Sequence: Synthetic oligonucleotide
ggaucuuguacaaacaaaugcuuucuc

SEQ ID NO: 156639 - RNA, 27 nt, Artificial Sequence
  Description of Artificial Sequence: Synthetic oligonucleotide
ucugcaaguacguucguuuaacucaag

SEQ ID NO: 156640 - RNA, 27 nt, Artificial Sequence
  Description of Artificial Sequence: Synthetic oligonucleotide
ucuguaucgaucguucuguaucagucu

SEQ ID NO: 156641 - RNA, 27 nt, Artificial Sequence
  Description of Artificial Sequence: Synthetic oligonucleotide
auuuauuuuuauauauauauaauauau

SEQ ID NO: 156642 - RNA, 27 nt, Artificial Sequence
  Description of Artificial Sequence: Synthetic oligonucleotide
auauuuauuuuuauauauauauaauau

SEQ ID NO: 156643 - RNA, 27 nt, Artificial Sequence
  Description of Artificial Sequence: Synthetic oligonucleotide
cacagcagucaaauacauccagugaag

SEQ ID NO: 156644 - RNA, 27 nt, Artificial Sequence
  Description of Artificial Sequence: Synthetic oligonucleotide
gucucucaucuccuccucuucccuguc

SEQ ID NO: 156645 - RNA, 27 nt, Artificial Sequence
  Description of Artificial Sequence: Synthetic oligonucleotide
ccaagugggacaaaaaaaagaucaugc

SEQ ID NO: 156646 - RNA, 14 nt, Artificial Sequence
  Description of Artificial Sequence: Synthetic oligonucleotide
guauuuugaugagg

SEQ ID NO: 156647 - RNA, 12 nt, Artificial Sequence
  Description of Artificial Sequence: Synthetic oligonucleotide
ggcccagaugau

SEQ ID NO: 156648 - RNA, 14 nt, Artificial Sequence
  Description of Artificial Sequence: Synthetic oligonucleotide
gggaagaaaacuau

SEQ ID NO: 156649 - RNA, 15 nt, Artificial Sequence
  Description of Artificial Sequence: Synthetic oligonucleotide
guuuuaauuuauuuc

SEQ ID NO: 156650 - RNA, 12 nt, Artificial Sequence
  Description of Artificial Sequence: Synthetic oligonucleotide
acguagggaaau

SEQ ID NO: 156651 - RNA, 12 nt, Artificial Sequence
  Description of Artificial Sequence: Synthetic oligonucleotide
ccaggguuuacc

SEQ ID NO: 156652 - RNA, 11 nt, Artificial Sequence
  Description of Artificial Sequence: Synthetic oligonucleotide
agcaagguuua

SEQ ID NO: 156653 - RNA, 12 nt, Artificial Sequence
  Description of Artificial Sequence: Synthetic oligonucleotide
uguauuauguug

SEQ ID NO: 156654 - RNA, 15 nt, Artificial Sequence
  Description of Artificial Sequence: Synthetic oligonucleotide
uuuuaaucuuuguga

SEQ ID NO: 156655 - RNA, 14 nt, Artificial Sequence
  Description of Artificial Sequence: Synthetic oligonucleotide
uuaaucuuugugac

SEQ ID NO: 156656 - RNA, 13 nt, Artificial Sequence
  Description of Artificial Sequence: Synthetic oligonucleotide
gcugcuuaugucu

SEQ ID NO: 156657 - RNA, 14 nt, Artificial Sequence
  Description of Artificial Sequence: Synthetic oligonucleotide
aaguguuucagaag

SEQ ID NO: 156658 - RNA, 13 nt, Artificial Sequence
  Description of Artificial Sequence: Synthetic oligonucleotide
gaccaucaauaag

SEQ ID NO: 156659 - RNA, 13 nt, Artificial Sequence
  Description of Artificial Sequence: Synthetic oligonucleotide
ccaucaauaagga

SEQ ID NO: 156660 - RNA, 14 nt, Artificial Sequence
  Description of Artificial Sequence: Synthetic oligonucleotide
ucaauaaggaagaa

SEQ ID NO: 156661 - RNA, 14 nt, Artificial Sequence
  Description of Artificial Sequence: Synthetic oligonucleotide
aauaaggaagaagc

SEQ ID NO: 156662 - RNA, 13 nt, Artificial Sequence
  Description of Artificial Sequence: Synthetic oligonucleotide
aggaagaagcccu

SEQ ID NO: 156663 - RNA, 13 nt, Artificial Sequence
  Description of Artificial Sequence: Synthetic oligonucleotide
gcauaacuaaagg

SEQ ID NO: 156664 - RNA, 14 nt, Artificial Sequence
  Description of Artificial Sequence: Synthetic oligonucleotide
cauaacuaaaggug

SEQ ID NO: 156665 - RNA, 12 nt, Artificial Sequence
  Description of Artificial Sequence: Synthetic oligonucleotide
cuacaucacgcc

SEQ ID NO: 156666 - RNA, 12 nt, Artificial Sequence
  Description of Artificial Sequence: Synthetic oligonucleotide
acuggauuuaag

SEQ ID NO: 156667 - RNA, 12 nt, Artificial Sequence
  Description of Artificial Sequence: Synthetic oligonucleotide
cuggauuuaagc

SEQ ID NO: 156668 - RNA, 13 nt, Artificial Sequence
  Description of Artificial Sequence: Synthetic oligonucleotide
gauuuaagcagag

SEQ ID NO: 156669 - RNA, 13 nt, Artificial Sequence
  Description of Artificial Sequence: Synthetic oligonucleotide
auuuaagcagagu

SEQ ID NO: 156670 - RNA, 13 nt, Artificial Sequence
  Description of Artificial Sequence: Synthetic oligonucleotide
uuaagcagaguuc

SEQ ID NO: 156671 - RNA, 13 nt, Artificial Sequence
  Description of Artificial Sequence: Synthetic oligonucleotide
uaagcagaguuca

SEQ ID NO: 156672 - RNA, 14 nt, Artificial Sequence
  Description of Artificial Sequence: Synthetic oligonucleotide
agcagaguucaaaa

SEQ ID NO: 156673 - RNA, 12 nt, Artificial Sequence
  Description of Artificial Sequence: Synthetic oligonucleotide
cucagggucuga

SEQ ID NO: 156674 - RNA, 13 nt, Artificial Sequence
  Description of Artificial Sequence: Synthetic oligonucleotide
caagcaacuacau

SEQ ID NO: 156675 - RNA, 12 nt, Artificial Sequence
  Description of Artificial Sequence: Synthetic oligonucleotide
aucaauggcagc

SEQ ID NO: 156676 - RNA, 11 nt, Artificial Sequence
  Description of Artificial Sequence: Synthetic oligonucleotide
uuccagcccac

SEQ ID NO: 156677 - RNA, 12 nt, Artificial Sequence
  Description of Artificial Sequence: Synthetic oligonucleotide
cagcugagaaug

SEQ ID NO: 156678 - RNA, 13 nt, Artificial Sequence
  Description of Artificial Sequence: Synthetic oligonucleotide
aacguaucuccua

SEQ ID NO: 156679 - RNA, 14 nt, Artificial Sequence
  Description of Artificial Sequence: Synthetic oligonucleotide
ccuaaaauaauuuc

SEQ ID NO: 156680 - RNA, 13 nt, Artificial Sequence
  Description of Artificial Sequence: Synthetic oligonucleotide
uggaagauucagc

SEQ ID NO: 156681 - RNA, 12 nt, Artificial Sequence
  Description of Artificial Sequence: Synthetic oligonucleotide
uuaaacucuccu

SEQ ID NO: 156682 - RNA, 12 nt, Artificial Sequence
  Description of Artificial Sequence: Synthetic oligonucleotide
cagccuacaguu

SEQ ID NO: 156683 - RNA, 13 nt, Artificial Sequence
  Description of Artificial Sequence: Synthetic oligonucleotide
guuauguucaguc

SEQ ID NO: 156684 - RNA, 13 nt, Artificial Sequence
  Description of Artificial Sequence: Synthetic oligonucleotide
cacauacaaaaug

SEQ ID NO: 156685 - RNA, 9 nt, Artificial Sequence
  Description of Artificial Sequence: Synthetic oligonucleotide
uccuuuugc

SEQ ID NO: 156686 - RNA, 12 nt, Artificial Sequence
  Description of Artificial Sequence: Synthetic oligonucleotide
ugaccugugaag

SEQ ID NO: 156687 - RNA, 12 nt, Artificial Sequence
  Description of Artificial Sequence: Synthetic oligonucleotide
cuaucucacaca

SEQ ID NO: 156688 - RNA, 13 nt, Artificial Sequence
  Description of Artificial Sequence: Synthetic oligonucleotide
uguccucaauugu

SEQ ID NO: 156689 - RNA, 12 nt, Artificial Sequence
  Description of Artificial Sequence: Synthetic oligonucleotide
aaaccguagcug

SEQ ID NO: 156690 - RNA, 12 nt, Artificial Sequence
  Description of Artificial Sequence: Synthetic oligonucleotide
uagcuggcaagc

SEQ ID NO: 156691 - RNA, 14 nt, Artificial Sequence
  Description of Artificial Sequence: Synthetic oligonucleotide
uuguaugguuaaaa

SEQ ID NO: 156692 - RNA, 14 nt, Artificial Sequence
  Description of Artificial Sequence: Synthetic oligonucleotide
ugguuaaaagaugg

SEQ ID NO: 156693 - RNA, 13 nt, Artificial Sequence
  Description of Artificial Sequence: Synthetic oligonucleotide
cagggaauuauac

SEQ ID NO: 156694 - RNA, 12 nt, Artificial Sequence
  Description of Artificial Sequence: Synthetic oligonucleotide
acaaucuugcug

SEQ ID NO: 156695 - RNA, 13 nt, Artificial Sequence
  Description of Artificial Sequence: Synthetic oligonucleotide
ccaauaaugaaga

SEQ ID NO: 156696 - RNA, 13 nt, Artificial Sequence
  Description of Artificial Sequence: Synthetic oligonucleotide
acuuuggauguuc

SEQ ID NO: 156697 - RNA, 12 nt, Artificial Sequence
  Description of Artificial Sequence: Synthetic oligonucleotide
aaugcuuccacu

SEQ ID NO: 156698 - RNA, 11 nt, Artificial Sequence
  Description of Artificial Sequence: Synthetic oligonucleotide
gagaaaguuug

SEQ ID NO: 156699 - RNA, 11 nt, Artificial Sequence
  Description of Artificial Sequence: Synthetic oligonucleotide
aaagaacuacu

SEQ ID NO: 156700 - RNA, 12 nt, Artificial Sequence
  Description of Artificial Sequence: Synthetic oligonucleotide
uuagaaauacgg

SEQ ID NO: 156701 - RNA, 12 nt, Artificial Sequence
  Description of Artificial Sequence: Synthetic oligonucleotide
aacauggguaca

SEQ ID NO: 156702 - RNA, 14 nt, Artificial Sequence
  Description of Artificial Sequence: Synthetic oligonucleotide
aaagacacagaaga

SEQ ID NO: 156703 - RNA, 11 nt, Artificial Sequence
  Description of Artificial Sequence: Synthetic oligonucleotide
uaguagggagg

SEQ ID NO: 156704 - RNA, 12 nt, Artificial Sequence
  Description of Artificial Sequence: Synthetic oligonucleotide
gccuucugcagc

SEQ ID NO: 156705 - RNA, 10 nt, Artificial Sequence
  Description of Artificial Sequence: Synthetic oligonucleotide
ggucugguac

SEQ ID NO: 156706 - RNA, 12 nt, Artificial Sequence
  Description of Artificial Sequence: Synthetic oligonucleotide
cuaguccuuccg

SEQ ID NO: 156707 - RNA, 12 nt, Artificial Sequence
  Description of Artificial Sequence: Synthetic oligonucleotide
ccagugaauauu

SEQ ID NO: 156708 - RNA, 13 nt, Artificial Sequence
  Description of Artificial Sequence: Synthetic oligonucleotide
augaauucaaguu

SEQ ID NO: 156709 - RNA, 12 nt, Artificial Sequence
  Description of Artificial Sequence: Synthetic oligonucleotide
caggacacagau

SEQ ID NO: 156710 - RNA, 12 nt, Artificial Sequence
  Description of Artificial Sequence: Synthetic oligonucleotide
cucaaagcacag

SEQ ID NO: 156711 - RNA, 10 nt, Artificial Sequence
  Description of Artificial Sequence: Synthetic oligonucleotide
accacugcca

SEQ ID NO: 156712 - RNA, 13 nt, Artificial Sequence
  Description of Artificial Sequence: Synthetic oligonucleotide
gaaacuacuagug

SEQ ID NO: 156713 - RNA, 12 nt, Artificial Sequence
  Description of Artificial Sequence: Synthetic oligonucleotide
aagucggacagc

SEQ ID NO: 156714 - RNA, 13 nt, Artificial Sequence
  Description of Artificial Sequence: Synthetic oligonucleotide
gaaagcgaaaaau

SEQ ID NO: 156715 - RNA, 13 nt, Artificial Sequence
  Description of Artificial Sequence: Synthetic oligonucleotide
cccucugauuuag

SEQ ID NO: 156716 - RNA, 12 nt, Artificial Sequence
  Description of Artificial Sequence: Synthetic oligonucleotide
ugagcuauuuaa

SEQ ID NO: 156717 - RNA, 13 nt, Artificial Sequence
  Description of Artificial Sequence: Synthetic oligonucleotide
aaaaggugaaaaa

SEQ ID NO: 156718 - RNA, 14 nt, Artificial Sequence
  Description of Artificial Sequence: Synthetic oligonucleotide
gaaaaagcacuauu

SEQ ID NO: 156719 - RNA, 12 nt, Artificial Sequence
  Description of Artificial Sequence: Synthetic oligonucleotide
ggcugaaaagaa

SEQ ID NO: 156720 - RNA, 12 nt, Artificial Sequence
  Description of Artificial Sequence: Synthetic oligonucleotide
uaaacccuuaua

SEQ ID NO: 156721 - RNA, 13 nt, Artificial Sequence
  Description of Artificial Sequence: Synthetic oligonucleotide
cauacuauuagcc

SEQ ID NO: 156722 - RNA, 12 nt, Artificial Sequence
  Description of Artificial Sequence: Synthetic oligonucleotide
gacagaagcauu

SEQ ID NO: 156723 - RNA, 14 nt, Artificial Sequence
  Description of Artificial Sequence: Synthetic oligonucleotide
agagcaaauaagau

SEQ ID NO: 156724 - RNA, 14 nt, Artificial Sequence
  Description of Artificial Sequence: Synthetic oligonucleotide
ccaacauuuuucuc

SEQ ID NO: 156725 - RNA, 15 nt, Artificial Sequence
  Description of Artificial Sequence: Synthetic oligonucleotide
uuaaguaugagaaaa

SEQ ID NO: 156726 - RNA, 14 nt, Artificial Sequence
  Description of Artificial Sequence: Synthetic oligonucleotide
caggaauaaagaug

SEQ ID NO: 156727 - RNA, 13 nt, Artificial Sequence
  Description of Artificial Sequence: Synthetic oligonucleotide
aauuugaaugacc

SEQ ID NO: 156728 - RNA, 14 nt, Artificial Sequence
  Description of Artificial Sequence: Synthetic oligonucleotide
auguauaaagauag

SEQ ID NO: 156729 - RNA, 12 nt, Artificial Sequence
  Description of Artificial Sequence: Synthetic oligonucleotide
ggcuguaacuau

SEQ ID NO: 156730 - RNA, 11 nt, Artificial Sequence
  Description of Artificial Sequence: Synthetic oligonucleotide
ucugugaagug

SEQ ID NO: 156731 - RNA, 14 nt, Artificial Sequence
  Description of Artificial Sequence: Synthetic oligonucleotide
ccuuuaaggaaaug

SEQ ID NO: 156732 - RNA, 13 nt, Artificial Sequence
  Description of Artificial Sequence: Synthetic oligonucleotide
aaggauacaaaaa

SEQ ID NO: 156733 - RNA, 12 nt, Artificial Sequence
  Description of Artificial Sequence: Synthetic oligonucleotide
agaugcaauuug

SEQ ID NO: 156734 - RNA, 12 nt, Artificial Sequence
  Description of Artificial Sequence: Synthetic oligonucleotide
guucaaaacgaa

SEQ ID NO: 156735 - RNA, 11 nt, Artificial Sequence
  Description of Artificial Sequence: Synthetic oligonucleotide
gugaaaccuca

SEQ ID NO: 156736 - RNA, 13 nt, Artificial Sequence
  Description of Artificial Sequence: Synthetic oligonucleotide
acgaaagagaagc

SEQ ID NO: 156737 - RNA, 12 nt, Artificial Sequence
  Description of Artificial Sequence: Synthetic oligonucleotide
cuccacaagcgc

SEQ ID NO: 156738 - RNA, 14 nt, Artificial Sequence
  Description of Artificial Sequence: Synthetic oligonucleotide
gagaagauuccaaa

SEQ ID NO: 156739 - RNA, 13 nt, Artificial Sequence
  Description of Artificial Sequence: Synthetic oligonucleotide
aaucuggauucaa

SEQ ID NO: 156740 - RNA, 13 nt, Artificial Sequence
  Description of Artificial Sequence: Synthetic oligonucleotide
agaacagauuuga

SEQ ID NO: 156741 - RNA, 11 nt, Artificial Sequence
  Description of Artificial Sequence: Synthetic oligonucleotide
ccagagcugug

SEQ ID NO: 156742 - RNA, 12 nt, Artificial Sequence
  Description of Artificial Sequence: Synthetic oligonucleotide
ccucagauuguu

SEQ ID NO: 156743 - RNA, 12 nt, Artificial Sequence
  Description of Artificial Sequence: Synthetic oligonucleotide
cuauuuuaauua

SEQ ID NO: 156744 - RNA, 13 nt, Artificial Sequence
  Description of Artificial Sequence: Synthetic oligonucleotide
uuuaauuuauuaa

SEQ ID NO: 156745 - RNA, 12 nt, Artificial Sequence
  Description of Artificial Sequence: Synthetic oligonucleotide
augcaguuugaa

SEQ ID NO: 156746 - RNA, 11 nt, Artificial Sequence
  Description of Artificial Sequence: Synthetic oligonucleotide
caugcugcugg

SEQ ID NO: 156747 - RNA, 13 nt, Artificial Sequence
  Description of Artificial Sequence: Synthetic oligonucleotide
agaugugcauuuc

SEQ ID NO: 156748 - RNA, 12 nt, Artificial Sequence
  Description of Artificial Sequence: Synthetic oligonucleotide
ucaaaaccugug

SEQ ID NO: 156749 - RNA, 11 nt, Artificial Sequence
  Description of Artificial Sequence: Synthetic oligonucleotide
gaaugugggua

SEQ ID NO: 156750 - RNA, 10 nt, Artificial Sequence
  Description of Artificial Sequence: Synthetic oligonucleotide
auguggguag

SEQ ID NO: 156751 - RNA, 13 nt, Artificial Sequence
  Description of Artificial Sequence: Synthetic oligonucleotide
ugaaaaugagcau

SEQ ID NO: 156752 - RNA, 13 nt, Artificial Sequence
  Description of Artificial Sequence: Synthetic oligonucleotide
uugcuuuucaugu

SEQ ID NO: 156753 - RNA, 12 nt, Artificial Sequence
  Description of Artificial Sequence: Synthetic oligonucleotide
uguauuucuaua

SEQ ID NO: 156754 - RNA, 13 nt, Artificial Sequence
  Description of Artificial Sequence: Synthetic oligonucleotide
uuugauuaauguu

SEQ ID NO: 156755 - RNA, 12 nt, Artificial Sequence
  Description of Artificial Sequence: Synthetic oligonucleotide
caacguguauag

SEQ ID NO: 156756 - RNA, 12 nt, Artificial Sequence
  Description of Artificial Sequence: Synthetic oligonucleotide
cauauccuuggc

SEQ ID NO: 156757 - RNA, 13 nt, Artificial Sequence
  Description of Artificial Sequence: Synthetic oligonucleotide
uacuaacaucugg

SEQ ID NO: 156758 - RNA, 11 nt, Artificial Sequence
  Description of Artificial Sequence: Synthetic oligonucleotide
cauaaguugug

SEQ ID NO: 156759 - RNA, 12 nt, Artificial Sequence
  Description of Artificial Sequence: Synthetic oligonucleotide
gcaucauuuugg

SEQ ID NO: 156760 - RNA, 10 nt, Artificial Sequence
  Description of Artificial Sequence: Synthetic oligonucleotide
gcucuucuua

SEQ ID NO: 156761 - RNA, 10 nt, Artificial Sequence
  Description of Artificial Sequence: Synthetic oligonucleotide
agauuagguc

SEQ ID NO: 156762 - RNA, 12 nt, Artificial Sequence
  Description of Artificial Sequence: Synthetic oligonucleotide
auggaauugaaa

SEQ ID NO: 156763 - RNA, 13 nt, Artificial Sequence
  Description of Artificial Sequence: Synthetic oligonucleotide
cacacucauuccu

SEQ ID NO: 156764 - RNA, 12 nt, Artificial Sequence
  Description of Artificial Sequence: Synthetic oligonucleotide
uguagagguaac

SEQ ID NO: 156765 - RNA, 11 nt, Artificial Sequence
  Description of Artificial Sequence: Synthetic oligonucleotide
caaccacaugc

SEQ ID NO: 156766 - RNA, 12 nt, Artificial Sequence
  Description of Artificial Sequence: Synthetic oligonucleotide
ucggaaacaagu

SEQ ID NO: 156767 - RNA, 11 nt, Artificial Sequence
  Description of Artificial Sequence: Synthetic oligonucleotide
acucccaauaa

SEQ ID NO: 156768 - RNA, 13 nt, Artificial Sequence
  Description of Artificial Sequence: Synthetic oligonucleotide
aaugcuaagaaau

SEQ ID NO: 156769 - RNA, 11 nt, Artificial Sequence
  Description of Artificial Sequence: Synthetic oligonucleotide
gucuuucucua

SEQ ID NO: 156770 - RNA, 11 nt, Artificial Sequence
  Description of Artificial Sequence: Synthetic oligonucleotide
ugaauuucagg

SEQ ID NO: 156771 - RNA, 13 nt, Artificial Sequence
  Description of Artificial Sequence: Synthetic oligonucleotide
cgauucccucuca

SEQ ID NO: 156772 - RNA, 11 nt, Artificial Sequence
  Description of Artificial Sequence: Synthetic oligonucleotide
aggaaagugaa

SEQ ID NO: 156773 - RNA, 12 nt, Artificial Sequence
  Description of Artificial Sequence: Synthetic oligonucleotide
gaggcugcaugc

SEQ ID NO: 156774 - RNA, 11 nt, Artificial Sequence
  Description of Artificial Sequence: Synthetic oligonucleotide
ucucugaacag

SEQ ID NO: 156775 - RNA, 12 nt, Artificial Sequence
  Description of Artificial Sequence: Synthetic oligonucleotide
aacuuggcugua

SEQ ID NO: 156776 - RNA, 12 nt, Artificial Sequence
  Description of Artificial Sequence: Synthetic oligonucleotide
agaagccaaaau

SEQ ID NO: 156777 - RNA, 14 nt, Artificial Sequence
  Description of Artificial Sequence: Synthetic oligonucleotide
auuaaaagaagucc

SEQ ID NO: 156778 - RNA, 14 nt, Artificial Sequence
  Description of Artificial Sequence: Synthetic oligonucleotide
gaauccggauuauc

SEQ ID NO: 156779 - RNA, 12 nt, Artificial Sequence
  Description of Artificial Sequence: Synthetic oligonucleotide
aaugugacauca

SEQ ID NO: 156780 - RNA, 13 nt, Artificial Sequence
  Description of Artificial Sequence: Synthetic oligonucleotide
caucaaagcaagu

SEQ ID NO: 156781 - RNA, 11 nt, Artificial Sequence
  Description of Artificial Sequence: Synthetic oligonucleotide
agagagagaaa

SEQ ID NO: 156782 - RNA, 13 nt, Artificial Sequence
  Description of Artificial Sequence: Synthetic oligonucleotide
ucgcuguaguauu

SEQ ID NO: 156783 - RNA, 14 nt, Artificial Sequence
  Description of Artificial Sequence: Synthetic oligonucleotide
cgcuguaguauuua

SEQ ID NO: 156784 - RNA, 13 nt, Artificial Sequence
  Description of Artificial Sequence: Synthetic oligonucleotide
auuuaagcccaua

SEQ ID NO: 156785 - RNA, 15 nt, Artificial Sequence
  Description of Artificial Sequence: Synthetic oligonucleotide
auuaaaauaaacaug

SEQ ID NO: 156786 - RNA, 12 nt, Artificial Sequence
  Description of Artificial Sequence: Synthetic oligonucleotide
cuguucugaucg

SEQ ID NO: 156787 - RNA, 16 nt, Artificial Sequence
  Description of Artificial Sequence: Synthetic oligonucleotide
aaauaauuugaacuuu

SEQ ID NO: 156788 - RNA, 12 nt, Artificial Sequence
  Description of Artificial Sequence: Synthetic oligonucleotide
ugcgaccuuaau

SEQ ID NO: 156789 - RNA, 11 nt, Artificial Sequence
  Description of Artificial Sequence: Synthetic oligonucleotide
cugagaaagcu

SEQ ID NO: 156790 - RNA, 13 nt, Artificial Sequence
  Description of Artificial Sequence: Synthetic oligonucleotide
aguaaagaugcua

SEQ ID NO: 156791 - RNA, 12 nt, Artificial Sequence
  Description of Artificial Sequence: Synthetic oligonucleotide
cugcuuaauugc

SEQ ID NO: 156792 - RNA, 14 nt, Artificial Sequence
  Description of Artificial Sequence: Synthetic oligonucleotide
uaccauaugaauga

SEQ ID NO: 156793 - RNA, 12 nt, Artificial Sequence
  Description of Artificial Sequence: Synthetic oligonucleotide
aacuuucuuauc

SEQ ID NO: 156794 - RNA, 13 nt, Artificial Sequence
  Description of Artificial Sequence: Synthetic oligonucleotide
ccuugcaugacau

SEQ ID NO: 156795 - RNA, 14 nt, Artificial Sequence
  Description of Artificial Sequence: Synthetic oligonucleotide
ugaauuuguauaug

SEQ ID NO: 156796 - RNA, 12 nt, Artificial Sequence
  Description of Artificial Sequence: Synthetic oligonucleotide
gaauccuaguag

SEQ ID NO: 156797 - RNA, 10 nt, Artificial Sequence
  Description of Artificial Sequence: Synthetic oligonucleotide
gaaagggaag

SEQ ID NO: 156798 - RNA, 11 nt, Artificial Sequence
  Description of Artificial Sequence: Synthetic oligonucleotide
uaucggcaugc

SEQ ID NO: 156799 - RNA, 12 nt, Artificial Sequence
  Description of Artificial Sequence: Synthetic oligonucleotide
caccucauagua

SEQ ID NO: 156800 - RNA, 11 nt, Artificial Sequence
  Description of Artificial Sequence: Synthetic oligonucleotide
ccagaauugcc

SEQ ID NO: 156801 - RNA, 11 nt, Artificial Sequence
  Description of Artificial Sequence: Synthetic oligonucleotide
uggugaucugg

SEQ ID NO: 156802 - RNA, 12 nt, Artificial Sequence
  Description of Artificial Sequence: Synthetic oligonucleotide
gaucuggguaau

SEQ ID NO: 156803 - RNA, 12 nt, Artificial Sequence
  Description of Artificial Sequence: Synthetic oligonucleotide
ggaugugaugaa

SEQ ID NO: 156804 - RNA, 12 nt, Artificial Sequence
  Description of Artificial Sequence: Synthetic oligonucleotide
cauuuccacagc

SEQ ID NO: 156805 - RNA, 11 nt, Artificial Sequence
  Description of Artificial Sequence: Synthetic oligonucleotide
acagcuacacc

SEQ ID NO: 156806 - RNA, 12 nt, Artificial Sequence
  Description of Artificial Sequence: Synthetic oligonucleotide
ugcaguucuuac

SEQ ID NO: 156807 - RNA, 12 nt, Artificial Sequence
  Description of Artificial Sequence: Synthetic oligonucleotide
acgagaagaaga

SEQ ID NO: 156808 - RNA, 12 nt, Artificial Sequence
  Description of Artificial Sequence: Synthetic oligonucleotide
cgagaagaagau

SEQ ID NO: 156809 - RNA, 15 nt, Artificial Sequence
  Description of Artificial Sequence: Synthetic oligonucleotide
aagaagaucauuuac

SEQ ID NO: 156810 - RNA, 11 nt, Artificial Sequence
  Description of Artificial Sequence: Synthetic oligonucleotide
agaggaagagg

SEQ ID NO: 156811 - RNA, 12 nt, Artificial Sequence
  Description of Artificial Sequence: Synthetic oligonucleotide
gaggaagaggug

SEQ ID NO: 156812 - RNA, 13 nt, Artificial Sequence
  Description of Artificial Sequence: Synthetic oligonucleotide
cuacuuugagggc

SEQ ID NO: 156813 - RNA, 12 nt, Artificial Sequence
  Description of Artificial Sequence: Synthetic oligonucleotide
agggcaucuccu

SEQ ID NO: 156814 - RNA, 10 nt, Artificial Sequence
  Description of Artificial Sequence: Synthetic oligonucleotide
ggagugauau

SEQ ID NO: 156815 - RNA, 11 nt, Artificial Sequence
  Description of Artificial Sequence: Synthetic oligonucleotide
gagugauaugg

SEQ ID NO: 156816 - RNA, 12 nt, Artificial Sequence
  Description of Artificial Sequence: Synthetic oligonucleotide
ugcaguaaagau

SEQ ID NO: 156817 - RNA, 13 nt, Artificial Sequence
  Description of Artificial Sequence: Synthetic oligonucleotide
aguaaagauccua

SEQ ID NO: 156818 - RNA, 12 nt, Artificial Sequence
  Description of Artificial Sequence: Synthetic oligonucleotide
ugacaaaggaca

SEQ ID NO: 156819 - RNA, 13 nt, Artificial Sequence
  Description of Artificial Sequence: Synthetic oligonucleotide
gcaauugugaccc

SEQ ID NO: 156820 - RNA, 12 nt, Artificial Sequence
  Description of Artificial Sequence: Synthetic oligonucleotide
aacaucauccau

SEQ ID NO: 156821 - RNA, 12 nt, Artificial Sequence
  Description of Artificial Sequence: Synthetic oligonucleotide
ugaaauccaaca

SEQ ID NO: 156822 - RNA, 15 nt, Artificial Sequence
  Description of Artificial Sequence: Synthetic oligonucleotide
aacaauauauuucuc

SEQ ID NO: 156823 - RNA, 14 nt, Artificial Sequence
  Description of Artificial Sequence: Synthetic oligonucleotide
aacaguaaagucac

SEQ ID NO: 156824 - RNA, 14 nt, Artificial Sequence
  Description of Artificial Sequence: Synthetic oligonucleotide
ugugaagaaaguaa

SEQ ID NO: 156825 - RNA, 13 nt, Artificial Sequence
  Description of Artificial Sequence: Synthetic oligonucleotide
cuuccgagccauc

SEQ ID NO: 156826 - RNA, 12 nt, Artificial Sequence
  Description of Artificial Sequence: Synthetic oligonucleotide
aauggagguuga

SEQ ID NO: 156827 - RNA, 12 nt, Artificial Sequence
  Description of Artificial Sequence: Synthetic oligonucleotide
ggagguugaaua

SEQ ID NO: 156828 - RNA, 13 nt, Artificial Sequence
  Description of Artificial Sequence: Synthetic oligonucleotide
auuuugaguuuuc

SEQ ID NO: 156829 - RNA, 12 nt, Artificial Sequence
  Description of Artificial Sequence: Synthetic oligonucleotide
uauccuguuugu

SEQ ID NO: 156830 - RNA, 11 nt, Artificial Sequence
  Description of Artificial Sequence: Synthetic oligonucleotide
ccuguuuguuc

SEQ ID NO: 156831 - RNA, 10 nt, Artificial Sequence
  Description of Artificial Sequence: Synthetic oligonucleotide
cucuacagcc

SEQ ID NO: 156832 - RNA, 12 nt, Artificial Sequence
  Description of Artificial Sequence: Synthetic oligonucleotide
ucuuccauagcu

SEQ ID NO: 156833 - RNA, 12 nt, Artificial Sequence
  Description of Artificial Sequence: Synthetic oligonucleotide
auaaucuuccug

SEQ ID NO: 156834 - RNA, 12 nt, Artificial Sequence
  Description of Artificial Sequence: Synthetic oligonucleotide
uaaucuuccugu

SEQ ID NO: 156835 - RNA, 12 nt, Artificial Sequence
  Description of Artificial Sequence: Synthetic oligonucleotide
cuucaugacuug

SEQ ID NO: 156836 - RNA, 12 nt, Artificial Sequence
  Description of Artificial Sequence: Synthetic oligonucleotide
aagagggagaga

SEQ ID NO: 156837 - RNA, 12 nt, Artificial Sequence
  Description of Artificial Sequence: Synthetic oligonucleotide
cgucuccuacca

SEQ ID NO: 156838 - RNA, 12 nt, Artificial Sequence
  Description of Artificial Sequence: Synthetic oligonucleotide
gaucaaucggcc

SEQ ID NO: 156839 - RNA, 12 nt, Artificial Sequence
  Description of Artificial Sequence: Synthetic oligonucleotide
ggacgaacaucc

SEQ ID NO: 156840 - RNA, 11 nt, Artificial Sequence
  Description of Artificial Sequence: Synthetic oligonucleotide
agggucggaac

SEQ ID NO: 156841 - RNA, 10 nt, Artificial Sequence
  Description of Artificial Sequence: Synthetic oligonucleotide
ucggaaccca

SEQ ID NO: 156842 - RNA, 11 nt, Artificial Sequence
  Description of Artificial Sequence: Synthetic oligonucleotide
acccaagcuua

SEQ ID NO: 156843 - RNA, 14 nt, Artificial Sequence
  Description of Artificial Sequence: Synthetic oligonucleotide
gaacuuuaagcaac

SEQ ID NO: 156844 - RNA, 11 nt, Artificial Sequence
  Description of Artificial Sequence: Synthetic oligonucleotide
acuauucagug

SEQ ID NO: 156845 - RNA, 11 nt, Artificial Sequence
  Description of Artificial Sequence: Synthetic oligonucleotide
cuauucagugg

SEQ ID NO: 156846 - RNA, 13 nt, Artificial Sequence
  Description of Artificial Sequence: Synthetic oligonucleotide
aaacacagauaac

SEQ ID NO: 156847 - RNA, 12 nt, Artificial Sequence
  Description of Artificial Sequence: Synthetic oligonucleotide
cuuaagaaaaga

SEQ ID NO: 156848 - RNA, 12 nt, Artificial Sequence
  Description of Artificial Sequence: Synthetic oligonucleotide
cugaaggagugu

SEQ ID NO: 156849 - RNA, 10 nt, Artificial Sequence
  Description of Artificial Sequence: Synthetic oligonucleotide
ucaccgcggg

SEQ ID NO: 156850 - RNA, 14 nt, Artificial Sequence
  Description of Artificial Sequence: Synthetic oligonucleotide
agcagaaauaagcg

SEQ ID NO: 156851 - RNA, 12 nt, Artificial Sequence
  Description of Artificial Sequence: Synthetic oligonucleotide
aagcgugccguu

SEQ ID NO: 156852 - RNA, 12 nt, Artificial Sequence
  Description of Artificial Sequence: Synthetic oligonucleotide
agaaacagucac

SEQ ID NO: 156853 - RNA, 12 nt, Artificial Sequence
  Description of Artificial Sequence: Synthetic oligonucleotide
agaggaagaagg

SEQ ID NO: 156854 - RNA, 14 nt, Artificial Sequence
  Description of Artificial Sequence: Synthetic oligonucleotide
uguauucaaaauau

SEQ ID NO: 156855 - RNA, 13 nt, Artificial Sequence
  Description of Artificial Sequence: Synthetic oligonucleotide
auuuuccucccuu

SEQ ID NO: 156856 - RNA, 13 nt, Artificial Sequence
  Description of Artificial Sequence: Synthetic oligonucleotide
caaagaaagauag

SEQ ID NO: 156857 - RNA, 12 nt, Artificial Sequence
  Description of Artificial Sequence: Synthetic oligonucleotide
aagaaagauaga

SEQ ID NO: 156858 - RNA, 13 nt, Artificial Sequence
  Description of Artificial Sequence: Synthetic oligonucleotide
gaaagcauuuguu

SEQ ID NO: 156859 - RNA, 13 nt, Artificial Sequence
  Description of Artificial Sequence: Synthetic oligonucleotide
ugaguuaaacgaa

SEQ ID NO: 156860 - RNA, 12 nt, Artificial Sequence
  Description of Artificial Sequence: Synthetic oligonucleotide
acugauacagaa

SEQ ID NO: 156861 - RNA, 12 nt, Artificial Sequence
  Description of Artificial Sequence: Synthetic oligonucleotide
auauuauauaua

SEQ ID NO: 156862 - RNA, 12 nt, Artificial Sequence
  Description of Artificial Sequence: Synthetic oligonucleotide
auuauauauaua

SEQ ID NO: 156863 - RNA, 12 nt, Artificial Sequence
  Description of Artificial Sequence: Synthetic oligonucleotide
ucacuggaugua

SEQ ID NO: 156864 - RNA, 12 nt, Artificial Sequence
  Description of Artificial Sequence: Synthetic oligonucleotide
cagggaagagga

SEQ ID NO: 156865 - RNA, 15 nt, Artificial Sequence
  Description of Artificial Sequence: Synthetic oligonucleotide
augaucuuuuuuuug

SEQ ID NO: 156866 - RNA, 11 nt, Artificial Sequence
  Description of Artificial Sequence: Synthetic oligonucleotide
aguucacggcc

SEQ ID NO: 156867 - RNA, 13 nt, Artificial Sequence
  Description of Artificial Sequence: Synthetic oligonucleotide
caccaucacacca

SEQ ID NO: 156868 - RNA, 11 nt, Artificial Sequence
  Description of Artificial Sequence: Synthetic oligonucleotide
ccugcggguuu

SEQ ID NO: 156869 - RNA, 10 nt, Artificial Sequence
  Description of Artificial Sequence: Synthetic oligonucleotide
auccaguuug

SEQ ID NO: 156870 - RNA, 13 nt, Artificial Sequence
  Description of Artificial Sequence: Synthetic oligonucleotide
guuaaggacuucu

SEQ ID NO: 156871 - RNA, 13 nt, Artificial Sequence
  Description of Artificial Sequence: Synthetic oligonucleotide
cagugggacagag

SEQ ID NO: 156872 - RNA, 14 nt, Artificial Sequence
  Description of Artificial Sequence: Synthetic oligonucleotide
aauuuguuauugug

SEQ ID NO: 156873 - RNA, 13 nt, Artificial Sequence
  Description of Artificial Sequence: Synthetic oligonucleotide
uucaaaugcauuu

SEQ ID NO: 156874 - RNA, 10 nt, Artificial Sequence
  Description of Artificial Sequence: Synthetic oligonucleotide
caggaaagcc

SEQ ID NO: 156875 - RNA, 11 nt, Artificial Sequence
  Description of Artificial Sequence: Synthetic oligonucleotide
aggaaagcccu

SEQ ID NO: 156876 - RNA, 12 nt, Artificial Sequence
  Description of Artificial Sequence: Synthetic oligonucleotide
cccagcauggcc

SEQ ID NO: 156877 - RNA, 11 nt, Artificial Sequence
  Description of Artificial Sequence: Synthetic oligonucleotide
cuucucccuga

SEQ ID NO: 156878 - RNA, 12 nt, Artificial Sequence
  Description of Artificial Sequence: Synthetic oligonucleotide
gaagaagcccuu

SEQ ID NO: 156879 - RNA, 12 nt, Artificial Sequence
  Description of Artificial Sequence: Synthetic oligonucleotide
agaagcccuuca

SEQ ID NO: 156880 - RNA, 11 nt, Artificial Sequence
  Description of Artificial Sequence: Synthetic oligonucleotide
gcccuucagcg

SEQ ID NO: 156881 - RNA, 11 nt, Artificial Sequence
  Description of Artificial Sequence: Synthetic oligonucleotide
ccuucagcggc

SEQ ID NO: 156882 - RNA, 12 nt, Artificial Sequence
  Description of Artificial Sequence: Synthetic oligonucleotide
ucagcggccagu

SEQ ID NO: 156883 - RNA, 12 nt, Artificial Sequence
  Description of Artificial Sequence: Synthetic oligonucleotide
ugaaaagcuccg

SEQ ID NO: 156884 - RNA, 11 nt, Artificial Sequence
  Description of Artificial Sequence: Synthetic oligonucleotide
aaaagcuccgg

SEQ ID NO: 156885 - RNA, 13 nt, Artificial Sequence
  Description of Artificial Sequence: Synthetic oligonucleotide
agucaacagucug

SEQ ID NO: 156886 - RNA, 13 nt, Artificial Sequence
  Description of Artificial Sequence: Synthetic oligonucleotide
cagaguucaaaag

SEQ ID NO: 156887 - RNA, 13 nt, Artificial Sequence
  Description of Artificial Sequence: Synthetic oligonucleotide
agaguucaaaagc

SEQ ID NO: 156888 - RNA, 12 nt, Artificial Sequence
  Description of Artificial Sequence: Synthetic oligonucleotide
uucaaaagcccu

SEQ ID NO: 156889 - RNA, 12 nt, Artificial Sequence
  Description of Artificial Sequence: Synthetic oligonucleotide
ucaaaagcccuu

SEQ ID NO: 156890 - RNA, 12 nt, Artificial Sequence
  Description of Artificial Sequence: Synthetic oligonucleotide
aaaagcccuuca

SEQ ID NO: 156891 - RNA, 12 nt, Artificial Sequence
  Description of Artificial Sequence: Synthetic oligonucleotide
aaagcccuucag

SEQ ID NO: 156892 - RNA, 13 nt, Artificial Sequence
  Description of Artificial Sequence: Synthetic oligonucleotide
gugaagccgcucg

SEQ ID NO: 156893 - RNA, 12 nt, Artificial Sequence
  Description of Artificial Sequence: Synthetic oligonucleotide
cacgccagucaa

SEQ ID NO: 156894 - RNA, 13 nt, Artificial Sequence
  Description of Artificial Sequence: Synthetic oligonucleotide
uucuuggugcgug

SEQ ID NO: 156895 - RNA, 14 nt, Artificial Sequence
  Description of Artificial Sequence: Synthetic oligonucleotide
auuggauucaucag

SEQ ID NO: 156896 - RNA, 13 nt, Artificial Sequence
  Description of Artificial Sequence: Synthetic oligonucleotide
uggaauaccuaag

SEQ ID NO: 156897 - RNA, 12 nt, Artificial Sequence
  Description of Artificial Sequence: Synthetic oligonucleotide
auuugaggcuca

SEQ ID NO: 156898 - RNA, 11 nt, Artificial Sequence
  Description of Artificial Sequence: Synthetic oligonucleotide
ucuacaauugg

SEQ ID NO: 156899 - RNA, 12 nt, Artificial Sequence
  Description of Artificial Sequence: Synthetic oligonucleotide
uaguuaggagcc

SEQ ID NO: 156900 - RNA, 13 nt, Artificial Sequence
  Description of Artificial Sequence: Synthetic oligonucleotide
agucaauauccac

SEQ ID NO: 156901 - RNA, 13 nt, Artificial Sequence
  Description of Artificial Sequence: Synthetic oligonucleotide
auguucagucaca

SEQ ID NO: 156902 - RNA, 12 nt, Artificial Sequence
  Description of Artificial Sequence: Synthetic oligonucleotide
acacacacauac

SEQ ID NO: 156903 - RNA, 12 nt, Artificial Sequence
  Description of Artificial Sequence: Synthetic oligonucleotide
uuccuuuugcuu

SEQ ID NO: 156904 - RNA, 16 nt, Artificial Sequence
  Description of Artificial Sequence: Synthetic oligonucleotide
uuuuaaaguaauuuuu

SEQ ID NO: 156905 - RNA, 13 nt, Artificial Sequence
  Description of Artificial Sequence: Synthetic oligonucleotide
caacagucaaugg

SEQ ID NO: 156906 - RNA, 13 nt, Artificial Sequence
  Description of Artificial Sequence: Synthetic oligonucleotide
ucgacaaaccaau

SEQ ID NO: 156907 - RNA, 12 nt, Artificial Sequence
  Description of Artificial Sequence: Synthetic oligonucleotide
acugcuaccacu

SEQ ID NO: 156908 - RNA, 13 nt, Artificial Sequence
  Description of Artificial Sequence: Synthetic oligonucleotide
gcaagcggucuua

SEQ ID NO: 156909 - RNA, 13 nt, Artificial Sequence
  Description of Artificial Sequence: Synthetic oligonucleotide
ggucuuaccggcu

SEQ ID NO: 156910 - RNA, 11 nt, Artificial Sequence
  Description of Artificial Sequence: Synthetic oligonucleotide
gauggguuacc

SEQ ID NO: 156911 - RNA, 11 nt, Artificial Sequence
  Description of Artificial Sequence: Synthetic oligonucleotide
guuaccugcga

SEQ ID NO: 156912 - RNA, 12 nt, Artificial Sequence
  Description of Artificial Sequence: Synthetic oligonucleotide
aaucuugcugag

SEQ ID NO: 156913 - RNA, 13 nt, Artificial Sequence
  Description of Artificial Sequence: Synthetic oligonucleotide
agcauaaaacagu

SEQ ID NO: 156914 - RNA, 12 nt, Artificial Sequence
  Description of Artificial Sequence: Synthetic oligonucleotide
guccuuuauccu

SEQ ID NO: 156915 - RNA, 12 nt, Artificial Sequence
  Description of Artificial Sequence: Synthetic oligonucleotide
caacgcaaguug

SEQ ID NO: 156916 - RNA, 13 nt, Artificial Sequence
  Description of Artificial Sequence: Synthetic oligonucleotide
aaacugaaaccau

SEQ ID NO: 156917 - RNA, 14 nt, Artificial Sequence
  Description of Artificial Sequence: Synthetic oligonucleotide
acuuuguuaaauau

SEQ ID NO: 156918 - RNA, 14 nt, Artificial Sequence
  Description of Artificial Sequence: Synthetic oligonucleotide
guauauuaaaaguu

SEQ ID NO: 156919 - RNA, 13 nt, Artificial Sequence
  Description of Artificial Sequence: Synthetic oligonucleotide
guuuugacuuaac

SEQ ID NO: 156920 - RNA, 13 nt, Artificial Sequence
  Description of Artificial Sequence: Synthetic oligonucleotide
gcaaacucagcac

SEQ ID NO: 156921 - RNA, 11 nt, Artificial Sequence
  Description of Artificial Sequence: Synthetic oligonucleotide
ugcugaccuca

SEQ ID NO: 156922 - RNA, 14 nt, Artificial Sequence
  Description of Artificial Sequence: Synthetic oligonucleotide
uuuauucagaucgc

SEQ ID NO: 156923 - RNA, 13 nt, Artificial Sequence
  Description of Artificial Sequence: Synthetic oligonucleotide
aggguucugggau

SEQ ID NO: 156924 - RNA, 15 nt, Artificial Sequence
  Description of Artificial Sequence: Synthetic oligonucleotide
auauuggaaauuaug

SEQ ID NO: 156925 - RNA, 13 nt, Artificial Sequence
  Description of Artificial Sequence: Synthetic oligonucleotide
auggaagcacuag

SEQ ID NO: 156926 - RNA, 13 nt, Artificial Sequence
  Description of Artificial Sequence: Synthetic oligonucleotide
guuuuuaugugga

SEQ ID NO: 156927 - RNA, 12 nt, Artificial Sequence
  Description of Artificial Sequence: Synthetic oligonucleotide
ggaauugguaga

SEQ ID NO: 156928 - RNA, 13 nt, Artificial Sequence
  Description of Artificial Sequence: Synthetic oligonucleotide
uuagacuuggaga

SEQ ID NO: 156929 - RNA, 13 nt, Artificial Sequence
  Description of Artificial Sequence: Synthetic oligonucleotide
uuacaguauucca

SEQ ID NO: 156930 - RNA, 15 nt, Artificial Sequence
  Description of Artificial Sequence: Synthetic oligonucleotide
ccacugaugaauuaa

SEQ ID NO: 156931 - RNA, 12 nt, Artificial Sequence
  Description of Artificial Sequence: Synthetic oligonucleotide
ccacaucaucac

SEQ ID NO: 156932 - RNA, 13 nt, Artificial Sequence
  Description of Artificial Sequence: Synthetic oligonucleotide
cucaccaaacaga

SEQ ID NO: 156933 - RNA, 12 nt, Artificial Sequence
  Description of Artificial Sequence: Synthetic oligonucleotide
ggaacaugaugg

SEQ ID NO: 156934 - RNA, 12 nt, Artificial Sequence
  Description of Artificial Sequence: Synthetic oligonucleotide
cauguagacugc

SEQ ID NO: 156935 - RNA, 13 nt, Artificial Sequence
  Description of Artificial Sequence: Synthetic oligonucleotide
ggaucuauuuaug

SEQ ID NO: 156936 - RNA, 12 nt, Artificial Sequence
  Description of Artificial Sequence: Synthetic oligonucleotide
gcacuauuauca

SEQ ID NO: 156937 - RNA, 11 nt, Artificial Sequence
  Description of Artificial Sequence: Synthetic oligonucleotide
aucaguucugc

SEQ ID NO: 156938 - RNA, 13 nt, Artificial Sequence
  Description of Artificial Sequence: Synthetic oligonucleotide
agauuaaaccuac

SEQ ID NO: 156939 - RNA, 13 nt, Artificial Sequence
  Description of Artificial Sequence: Synthetic oligonucleotide
auaaaauccuucu

SEQ ID NO: 156940 - RNA, 12 nt, Artificial Sequence
  Description of Artificial Sequence: Synthetic oligonucleotide
aaugcuguagac

SEQ ID NO: 156941 - RNA, 13 nt, Artificial Sequence
  Description of Artificial Sequence: Synthetic oligonucleotide
uugauaggaauag

SEQ ID NO: 156942 - RNA, 11 nt, Artificial Sequence
  Description of Artificial Sequence: Synthetic oligonucleotide
aauggcccuga

SEQ ID NO: 156943 - RNA, 11 nt, Artificial Sequence
  Description of Artificial Sequence: Synthetic oligonucleotide
uuccucaagca

SEQ ID NO: 156944 - RNA, 10 nt, Artificial Sequence
  Description of Artificial Sequence: Synthetic oligonucleotide
guucagccca

SEQ ID NO: 156945 - RNA, 11 nt, Artificial Sequence
  Description of Artificial Sequence: Synthetic oligonucleotide
gcugcugaacc

SEQ ID NO: 156946 - RNA, 12 nt, Artificial Sequence
  Description of Artificial Sequence: Synthetic oligonucleotide
aaguucucuuca

SEQ ID NO: 156947 - RNA, 11 nt, Artificial Sequence
  Description of Artificial Sequence: Synthetic oligonucleotide
ccagccuagag

SEQ ID NO: 156948 - RNA, 13 nt, Artificial Sequence
  Description of Artificial Sequence: Synthetic oligonucleotide
cucugugaagugu

SEQ ID NO: 156949 - RNA, 14 nt, Artificial Sequence
  Description of Artificial Sequence: Synthetic oligonucleotide
ugagaaaauuucaa

SEQ ID NO: 156950 - RNA, 11 nt, Artificial Sequence
  Description of Artificial Sequence: Synthetic oligonucleotide
aauccuccuga

SEQ ID NO: 156951 - RNA, 12 nt, Artificial Sequence
  Description of Artificial Sequence: Synthetic oligonucleotide
gugacaucauau

SEQ ID NO: 156952 - RNA, 13 nt, Artificial Sequence
  Description of Artificial Sequence: Synthetic oligonucleotide
aaucuucaucaua

SEQ ID NO: 156953 - RNA, 13 nt, Artificial Sequence
  Description of Artificial Sequence: Synthetic oligonucleotide
gacuagcuauuaa

SEQ ID NO: 156954 - RNA, 14 nt, Artificial Sequence
  Description of Artificial Sequence: Synthetic oligonucleotide
ucucuacuaaaaau

SEQ ID NO: 156955 - RNA, 12 nt, Artificial Sequence
  Description of Artificial Sequence: Synthetic oligonucleotide
ucuaucucgccu

SEQ ID NO: 156956 - RNA, 13 nt, Artificial Sequence
  Description of Artificial Sequence: Synthetic oligonucleotide
cuucgguccaguu

SEQ ID NO: 156957 - RNA, 11 nt, Artificial Sequence
  Description of Artificial Sequence: Synthetic oligonucleotide
gauguagccgc

SEQ ID NO: 156958 - RNA, 12 nt, Artificial Sequence
  Description of Artificial Sequence: Synthetic oligonucleotide
ugaggagacuug

SEQ ID NO: 156959 - RNA, 12 nt, Artificial Sequence
  Description of Artificial Sequence: Synthetic oligonucleotide
gaguagugagga

SEQ ID NO: 156960 - RNA, 14 nt, Artificial Sequence
  Description of Artificial Sequence: Synthetic oligonucleotide
cagaugaguacaaa

SEQ ID NO: 156961 - RNA, 13 nt, Artificial Sequence
  Description of Artificial Sequence: Synthetic oligonucleotide
guuguuaaugggc

SEQ ID NO: 156962 - RNA, 13 nt, Artificial Sequence
  Description of Artificial Sequence: Synthetic oligonucleotide
uuuuuaauuuauu

SEQ ID NO: 156963 - RNA, 12 nt, Artificial Sequence
  Description of Artificial Sequence: Synthetic oligonucleotide
uauuuaaauaug

SEQ ID NO: 156964 - RNA, 13 nt, Artificial Sequence
  Description of Artificial Sequence: Synthetic oligonucleotide
uauccuuuguuuc

SEQ ID NO: 156965 - RNA, 14 nt, Artificial Sequence
  Description of Artificial Sequence: Synthetic oligonucleotide
cgucuaaguguuug

SEQ ID NO: 156966 - RNA, 12 nt, Artificial Sequence
  Description of Artificial Sequence: Synthetic oligonucleotide
accugugacaaa

SEQ ID NO: 156967 - RNA, 13 nt, Artificial Sequence
  Description of Artificial Sequence: Synthetic oligonucleotide
ccaggcugaauua

SEQ ID NO: 156968 - RNA, 14 nt, Artificial Sequence
  Description of Artificial Sequence: Synthetic oligonucleotide
gucauucuuacaau

SEQ ID NO: 156969 - RNA, 15 nt, Artificial Sequence
  Description of Artificial Sequence: Synthetic oligonucleotide
ucauucuuacaauug

SEQ ID NO: 156970 - RNA, 12 nt, Artificial Sequence
  Description of Artificial Sequence: Synthetic oligonucleotide
cagagaguguac

SEQ ID NO: 156971 - RNA, 12 nt, Artificial Sequence
  Description of Artificial Sequence: Synthetic oligonucleotide
agaacucagcag

SEQ ID NO: 156972 - RNA, 13 nt, Artificial Sequence
  Description of Artificial Sequence: Synthetic oligonucleotide
uuuauuuucagua

SEQ ID NO: 156973 - RNA, 12 nt, Artificial Sequence
  Description of Artificial Sequence: Synthetic oligonucleotide
ucuuaaauggaa

SEQ ID NO: 156974 - RNA, 13 nt, Artificial Sequence
  Description of Artificial Sequence: Synthetic oligonucleotide
ugccuaaaauugu

SEQ ID NO: 156975 - RNA, 12 nt, Artificial Sequence
  Description of Artificial Sequence: Synthetic oligonucleotide
agacugugagcu

SEQ ID NO: 156976 - RNA, 14 nt, Artificial Sequence
  Description of Artificial Sequence: Synthetic oligonucleotide
ugcuuuuuauuaau

SEQ ID NO: 156977 - RNA, 13 nt, Artificial Sequence
  Description of Artificial Sequence: Synthetic oligonucleotide
cucuucuuacauu

SEQ ID NO: 156978 - RNA, 15 nt, Artificial Sequence
  Description of Artificial Sequence: Synthetic oligonucleotide
cauuuguaaaaaugu

SEQ ID NO: 156979 - RNA, 15 nt, Artificial Sequence
  Description of Artificial Sequence: Synthetic oligonucleotide
aucuuaauucauauu

SEQ ID NO: 156980 - RNA, 13 nt, Artificial Sequence
  Description of Artificial Sequence: Synthetic oligonucleotide
gaacuaaucauga

SEQ ID NO: 156981 - RNA, 12 nt, Artificial Sequence
  Description of Artificial Sequence: Synthetic oligonucleotide
ucugcucuuggg

SEQ ID NO: 156982 - RNA, 13 nt, Artificial Sequence
  Description of Artificial Sequence: Synthetic oligonucleotide
caguagcuuugag

SEQ ID NO: 156983 - RNA, 14 nt, Artificial Sequence
  Description of Artificial Sequence: Synthetic oligonucleotide
cacguaauauuuca

SEQ ID NO: 156984 - RNA, 13 nt, Artificial Sequence
  Description of Artificial Sequence: Synthetic oligonucleotide
uauucucuucacu

SEQ ID NO: 156985 - RNA, 14 nt, Artificial Sequence
  Description of Artificial Sequence: Synthetic oligonucleotide
cuaaugcuaagaaa

SEQ ID NO: 156986 - RNA, 12 nt, Artificial Sequence
  Description of Artificial Sequence: Synthetic oligonucleotide
gcugaaaaucaa

SEQ ID NO: 156987 - RNA, 14 nt, Artificial Sequence
  Description of Artificial Sequence: Synthetic oligonucleotide
aauaugauuacuuu

SEQ ID NO: 156988 - RNA, 14 nt, Artificial Sequence
  Description of Artificial Sequence: Synthetic oligonucleotide
cauuuuguucuaca

SEQ ID NO: 156989 - RNA, 12 nt, Artificial Sequence
  Description of Artificial Sequence: Synthetic oligonucleotide
cccgggacucuc

SEQ ID NO: 156990 - RNA, 14 nt, Artificial Sequence
  Description of Artificial Sequence: Synthetic oligonucleotide
ccuuuaaaguaaag

SEQ ID NO: 156991 - RNA, 13 nt, Artificial Sequence
  Description of Artificial Sequence: Synthetic oligonucleotide
ucuggaagccugg

SEQ ID NO: 156992 - RNA, 14 nt, Artificial Sequence
  Description of Artificial Sequence: Synthetic oligonucleotide
aaaacaaaagagag

SEQ ID NO: 156993 - RNA, 13 nt, Artificial Sequence
  Description of Artificial Sequence: Synthetic oligonucleotide
aucaguuaugccg

SEQ ID NO: 156994 - RNA, 13 nt, Artificial Sequence
  Description of Artificial Sequence: Synthetic oligonucleotide
uaaaagaagucca

SEQ ID NO: 156995 - RNA, 11 nt, Artificial Sequence
  Description of Artificial Sequence: Synthetic oligonucleotide
aggugagguua

SEQ ID NO: 156996 - RNA, 11 nt, Artificial Sequence
  Description of Artificial Sequence: Synthetic oligonucleotide
gggaagaggac

SEQ ID NO: 156997 - RNA, 13 nt, Artificial Sequence
  Description of Artificial Sequence: Synthetic oligonucleotide
aagcaaguauugu

SEQ ID NO: 156998 - RNA, 12 nt, Artificial Sequence
  Description of Artificial Sequence: Synthetic oligonucleotide
auuguagcacuc

SEQ ID NO: 156999 - RNA, 14 nt, Artificial Sequence
  Description of Artificial Sequence: Synthetic oligonucleotide
acaaaaccacaaau

SEQ ID NO: 157000 - RNA, 12 nt, Artificial Sequence
  Description of Artificial Sequence: Synthetic oligonucleotide
uaagcccauaca

SEQ ID NO: 157001 - RNA, 11 nt, Artificial Sequence
  Description of Artificial Sequence: Synthetic oligonucleotide
agcccauacag

SEQ ID NO: 157002 - RNA, 12 nt, Artificial Sequence
  Description of Artificial Sequence: Synthetic oligonucleotide
cagaaaccuucc

SEQ ID NO: 157003 - RNA, 10 nt, Artificial Sequence
  Description of Artificial Sequence: Synthetic oligonucleotide
guauaccuac

SEQ ID NO: 157004 - RNA, 13 nt, Artificial Sequence
  Description of Artificial Sequence: Synthetic oligonucleotide
gccaguuuucgga

SEQ ID NO: 157005 - RNA, 9 nt, Artificial Sequence
  Description of Artificial Sequence: Synthetic oligonucleotide
ggaacaggg

SEQ ID NO: 157006 - RNA, 13 nt, Artificial Sequence
  Description of Artificial Sequence: Synthetic oligonucleotide
uuaacuuuccagu

SEQ ID NO: 157007 - RNA, 14 nt, Artificial Sequence
  Description of Artificial Sequence: Synthetic oligonucleotide
aaaguuugguuuug

SEQ ID NO: 157008 - RNA, 12 nt, Artificial Sequence
  Description of Artificial Sequence: Synthetic oligonucleotide
cuucccacugua

SEQ ID NO: 157009 - RNA, 13 nt, Artificial Sequence
  Description of Artificial Sequence: Synthetic oligonucleotide
ugauaccauauga

SEQ ID NO: 157010 - RNA, 11 nt, Artificial Sequence
  Description of Artificial Sequence: Synthetic oligonucleotide
aacaugggcug

SEQ ID NO: 157011 - RNA, 13 nt, Artificial Sequence
  Description of Artificial Sequence: Synthetic oligonucleotide
caacuuuuucaua

SEQ ID NO: 157012 - RNA, 12 nt, Artificial Sequence
  Description of Artificial Sequence: Synthetic oligonucleotide
caugaggccgga

SEQ ID NO: 157013 - RNA, 11 nt, Artificial Sequence
  Description of Artificial Sequence: Synthetic oligonucleotide
acugcauuugu

SEQ ID NO: 157014 - RNA, 13 nt, Artificial Sequence
  Description of Artificial Sequence: Synthetic oligonucleotide
aauguuuacuacc

SEQ ID NO: 157015 - RNA, 15 nt, Artificial Sequence
  Description of Artificial Sequence: Synthetic oligonucleotide
aauuuuuugaugaaa

SEQ ID NO: 157016 - RNA, 14 nt, Artificial Sequence
  Description of Artificial Sequence: Synthetic oligonucleotide
cagugugugaauuu

SEQ ID NO: 157017 - RNA, 13 nt, Artificial Sequence
  Description of Artificial Sequence: Synthetic oligonucleotide
gagcaauguaugu

SEQ ID NO: 157018 - RNA, 14 nt, Artificial Sequence
  Description of Artificial Sequence: Synthetic oligonucleotide
aaagcacauauaua

SEQ ID NO: 157019 - RNA, 14 nt, Artificial Sequence
  Description of Artificial Sequence: Synthetic oligonucleotide
guaauaguuucucc

SEQ ID NO: 157020 - RNA, 13 nt, Artificial Sequence
  Description of Artificial Sequence: Synthetic oligonucleotide
aguuucuccaaau

SEQ ID NO: 157021 - RNA, 13 nt, Artificial Sequence
  Description of Artificial Sequence: Synthetic oligonucleotide
uacuuccuagaaa

SEQ ID NO: 157022 - RNA, 13 nt, Artificial Sequence
  Description of Artificial Sequence: Synthetic oligonucleotide
uacaccauauaug

SEQ ID NO: 157023 - RNA, 14 nt, Artificial Sequence
  Description of Artificial Sequence: Synthetic oligonucleotide
auauaugaauggag

SEQ ID NO: 157024 - RNA, 13 nt, Artificial Sequence
  Description of Artificial Sequence: Synthetic oligonucleotide
acgagaagaagau

SEQ ID NO: 157025 - RNA, 13 nt, Artificial Sequence
  Description of Artificial Sequence: Synthetic oligonucleotide
ucauuuacaggga

SEQ ID NO: 157026 - RNA, 13 nt, Artificial Sequence
  Description of Artificial Sequence: Synthetic oligonucleotide
cauuuacagggac

SEQ ID NO: 157027 - RNA, 10 nt, Artificial Sequence
  Description of Artificial Sequence: Synthetic oligonucleotide
agggaccuga

SEQ ID NO: 157028 - RNA, 14 nt, Artificial Sequence
  Description of Artificial Sequence: Synthetic oligonucleotide
uguuugacugcauc

SEQ ID NO: 157029 - RNA, 13 nt, Artificial Sequence
  Description of Artificial Sequence: Synthetic oligonucleotide
uuugacugcaucg

SEQ ID NO: 157030 - RNA, 12 nt, Artificial Sequence
  Description of Artificial Sequence: Synthetic oligonucleotide
gaguucacaggg

SEQ ID NO: 157031 - RNA, 13 nt, Artificial Sequence
  Description of Artificial Sequence: Synthetic oligonucleotide
ggcaccucugucc

SEQ ID NO: 157032 - RNA, 15 nt, Artificial Sequence
  Description of Artificial Sequence: Synthetic oligonucleotide
gguuugucuuuuuaa

SEQ ID NO: 157033 - RNA, 14 nt, Artificial Sequence
  Description of Artificial Sequence: Synthetic oligonucleotide
uuugucuuuuuaag

SEQ ID NO: 157034 - RNA, 13 nt, Artificial Sequence
  Description of Artificial Sequence: Synthetic oligonucleotide
ccuaaagguuguc

SEQ ID NO: 157035 - RNA, 12 nt, Artificial Sequence
  Description of Artificial Sequence: Synthetic oligonucleotide
aagguugucgac

SEQ ID NO: 157036 - RNA, 13 nt, Artificial Sequence
  Description of Artificial Sequence: Synthetic oligonucleotide
accuggcaauugu

SEQ ID NO: 157037 - RNA, 12 nt, Artificial Sequence
  Description of Artificial Sequence: Synthetic oligonucleotide
aguggugcgagg

SEQ ID NO: 157038 - RNA, 13 nt, Artificial Sequence
  Description of Artificial Sequence: Synthetic oligonucleotide
agagacaugaaau

SEQ ID NO: 157039 - RNA, 13 nt, Artificial Sequence
  Description of Artificial Sequence: Synthetic oligonucleotide
auauauuucucca

SEQ ID NO: 157040 - RNA, 10 nt, Artificial Sequence
  Description of Artificial Sequence: Synthetic oligonucleotide
caugaaggcu

SEQ ID NO: 157041 - RNA, 11 nt, Artificial Sequence
  Description of Artificial Sequence: Synthetic oligonucleotide
gcuggaguggu

SEQ ID NO: 157042 - RNA, 11 nt, Artificial Sequence
  Description of Artificial Sequence: Synthetic oligonucleotide
aggaagagagg

SEQ ID NO: 157043 - RNA, 12 nt, Artificial Sequence
  Description of Artificial Sequence: Synthetic oligonucleotide
cuugcaucgggc

SEQ ID NO: 157044 - RNA, 13 nt, Artificial Sequence
  Description of Artificial Sequence: Synthetic oligonucleotide
auauccuacugug

SEQ ID NO: 157045 - RNA, 13 nt, Artificial Sequence
  Description of Artificial Sequence: Synthetic oligonucleotide
uccuacuguguaa

SEQ ID NO: 157046 - RNA, 12 nt, Artificial Sequence
  Description of Artificial Sequence: Synthetic oligonucleotide
ccuuguagugua

SEQ ID NO: 157047 - RNA, 13 nt, Artificial Sequence
  Description of Artificial Sequence: Synthetic oligonucleotide
ucuuuguugauug

SEQ ID NO: 157048 - RNA, 14 nt, Artificial Sequence
  Description of Artificial Sequence: Synthetic oligonucleotide
uuuguugauugaaa

SEQ ID NO: 157049 - RNA, 15 nt, Artificial Sequence
  Description of Artificial Sequence: Synthetic oligonucleotide
uucuuuuucuuccau

SEQ ID NO: 157050 - RNA, 13 nt, Artificial Sequence
  Description of Artificial Sequence: Synthetic oligonucleotide
aaucuuccuucua

SEQ ID NO: 157051 - RNA, 13 nt, Artificial Sequence
  Description of Artificial Sequence: Synthetic oligonucleotide
uugaaugcuucau

SEQ ID NO: 157052 - RNA, 13 nt, Artificial Sequence
  Description of Artificial Sequence: Synthetic oligonucleotide
ugaaugcuucaug

SEQ ID NO: 157053 - RNA, 13 nt, Artificial Sequence
  Description of Artificial Sequence: Synthetic oligonucleotide
aauucuacuuuga

SEQ ID NO: 157054 - RNA, 13 nt, Artificial Sequence
  Description of Artificial Sequence: Synthetic oligonucleotide
agcaacuacagac

SEQ ID NO: 157055 - RNA, 13 nt, Artificial Sequence
  Description of Artificial Sequence: Synthetic oligonucleotide
gaccaaggucaac

SEQ ID NO: 157056 - RNA, 13 nt, Artificial Sequence
  Description of Artificial Sequence: Synthetic oligonucleotide
cgacuaucucgac

SEQ ID NO: 157057 - RNA, 13 nt, Artificial Sequence
  Description of Artificial Sequence: Synthetic oligonucleotide
aaccuucccaaac

SEQ ID NO: 157058 - RNA, 14 nt, Artificial Sequence
  Description of Artificial Sequence: Synthetic oligonucleotide
ccaagcuuagaacu

SEQ ID NO: 157059 - RNA, 15 nt, Artificial Sequence
  Description of Artificial Sequence: Synthetic oligonucleotide
agcuuagaacuuuaa

SEQ ID NO: 157060 - RNA, 11 nt, Artificial Sequence
  Description of Artificial Sequence: Synthetic oligonucleotide
aagaccaccac

SEQ ID NO: 157061 - RNA, 14 nt, Artificial Sequence
  Description of Artificial Sequence: Synthetic oligonucleotide
gcgagaaauaaagu

SEQ ID NO: 157062 - RNA, 14 nt, Artificial Sequence
  Description of Artificial Sequence: Synthetic oligonucleotide
cgagaaauaaaguu

SEQ ID NO: 157063 - RNA, 12 nt, Artificial Sequence
  Description of Artificial Sequence: Synthetic oligonucleotide
aggaaaugaucc

SEQ ID NO: 157064 - RNA, 13 nt, Artificial Sequence
  Description of Artificial Sequence: Synthetic oligonucleotide
gaagaaaugaaac

SEQ ID NO: 157065 - RNA, 13 nt, Artificial Sequence
  Description of Artificial Sequence: Synthetic oligonucleotide
guuuccauccucc

SEQ ID NO: 157066 - RNA, 15 nt, Artificial Sequence
  Description of Artificial Sequence: Synthetic oligonucleotide
acugaaaaucuuuga

SEQ ID NO: 157067 - RNA, 11 nt, Artificial Sequence
  Description of Artificial Sequence: Synthetic oligonucleotide
ugccguucagg

SEQ ID NO: 157068 - RNA, 13 nt, Artificial Sequence
  Description of Artificial Sequence: Synthetic oligonucleotide
caggguccagaag

SEQ ID NO: 157069 - RNA, 13 nt, Artificial Sequence
  Description of Artificial Sequence: Synthetic oligonucleotide
ucaagacugcuug

SEQ ID NO: 157070 - RNA, 13 nt, Artificial Sequence
  Description of Artificial Sequence: Synthetic oligonucleotide
uccaugucuuugg

SEQ ID NO: 157071 - RNA, 11 nt, Artificial Sequence
  Description of Artificial Sequence: Synthetic oligonucleotide
gccugaaacac

SEQ ID NO: 157072 - RNA, 12 nt, Artificial Sequence
  Description of Artificial Sequence: Synthetic oligonucleotide
ucucuguaccuc

SEQ ID NO: 157073 - RNA, 12 nt, Artificial Sequence
  Description of Artificial Sequence: Synthetic oligonucleotide
agcaagacaaga

SEQ ID NO: 157074 - RNA, 13 nt, Artificial Sequence
  Description of Artificial Sequence: Synthetic oligonucleotide
gcaagacaagaaa

SEQ ID NO: 157075 - RNA, 12 nt, Artificial Sequence
  Description of Artificial Sequence: Synthetic oligonucleotide
uguacaagaucc

SEQ ID NO: 157076 - RNA, 12 nt, Artificial Sequence
  Description of Artificial Sequence: Synthetic oligonucleotide
cguacuugcaga

SEQ ID NO: 157077 - RNA, 13 nt, Artificial Sequence
  Description of Artificial Sequence: Synthetic oligonucleotide
cgaucgauacaga

SEQ ID NO: 157078 - RNA, 13 nt, Artificial Sequence
  Description of Artificial Sequence: Synthetic oligonucleotide
uauaaaaauaaau

SEQ ID NO: 157079 - RNA, 13 nt, Artificial Sequence
  Description of Artificial Sequence: Synthetic oligonucleotide
uaaaaauaaauau

SEQ ID NO: 157080 - RNA, 13 nt, Artificial Sequence
  Description of Artificial Sequence: Synthetic oligonucleotide
uuugacugcugug

SEQ ID NO: 157081 - RNA, 13 nt, Artificial Sequence
  Description of Artificial Sequence: Synthetic oligonucleotide
ggagaugagagac

SEQ ID NO: 157082 - RNA, 10 nt, Artificial Sequence
  Description of Artificial Sequence: Synthetic oligonucleotide
ucccacuugg

SEQ ID NO: 157083 - RNA, 10 nt, Artificial Sequence
  Description of Artificial Sequence: Synthetic oligonucleotide
guucacggcc

SEQ ID NO: 157084 - RNA, 12 nt, Artificial Sequence
  Description of Artificial Sequence: Synthetic oligonucleotide
accaucacacca

SEQ ID NO: 157085 - RNA, 10 nt, Artificial Sequence
  Description of Artificial Sequence: Synthetic oligonucleotide
cugcggguuu

SEQ ID NO: 157086 - RNA, 9 nt, Artificial Sequence
  Description of Artificial Sequence: Synthetic oligonucleotide
uccaguuug

SEQ ID NO: 157087 - RNA, 12 nt, Artificial Sequence
  Description of Artificial Sequence: Synthetic oligonucleotide
uuaaggacuucu

SEQ ID NO: 157088 - RNA, 12 nt, Artificial Sequence
  Description of Artificial Sequence: Synthetic oligonucleotide
agugggacagag

SEQ ID NO: 157089 - RNA, 13 nt, Artificial Sequence
  Description of Artificial Sequence: Synthetic oligonucleotide
auuuguuauugug

SEQ ID NO: 157090 - RNA, 12 nt, Artificial Sequence
  Description of Artificial Sequence: Synthetic oligonucleotide
ucaaaugcauuu

SEQ ID NO: 157091 - RNA, 9 nt, Artificial Sequence
  Description of Artificial Sequence: Synthetic oligonucleotide
aggaaagcc

SEQ ID NO: 157092 - RNA, 10 nt, Artificial Sequence
  Description of Artificial Sequence: Synthetic oligonucleotide
ggaaagcccu

SEQ ID NO: 157093 - RNA, 11 nt, Artificial Sequence
  Description of Artificial Sequence: Synthetic oligonucleotide
ccagcauggcc

SEQ ID NO: 157094 - RNA, 10 nt, Artificial Sequence
  Description of Artificial Sequence: Synthetic oligonucleotide
uucucccuga

SEQ ID NO: 157095 - RNA, 11 nt, Artificial Sequence
  Description of Artificial Sequence: Synthetic oligonucleotide
aagaagcccuu

SEQ ID NO: 157096 - RNA, 11 nt, Artificial Sequence
  Description of Artificial Sequence: Synthetic oligonucleotide
gaagcccuuca

SEQ ID NO: 157097 - RNA, 10 nt, Artificial Sequence
  Description of Artificial Sequence: Synthetic oligonucleotide
cccuucagcg

SEQ ID NO: 157098 - RNA, 10 nt, Artificial Sequence
  Description of Artificial Sequence: Synthetic oligonucleotide
cuucagcggc

SEQ ID NO: 157099 - RNA, 11 nt, Artificial Sequence
  Description of Artificial Sequence: Synthetic oligonucleotide
cagcggccagu

SEQ ID NO: 157100 - RNA, 11 nt, Artificial Sequence
  Description of Artificial Sequence: Synthetic oligonucleotide
gaaaagcuccg

SEQ ID NO: 157101 - RNA, 10 nt, Artificial Sequence
  Description of Artificial Sequence: Synthetic oligonucleotide
aaagcuccgg

SEQ ID NO: 157102 - RNA, 12 nt, Artificial Sequence
  Description of Artificial Sequence: Synthetic oligonucleotide
gucaacagucug

SEQ ID NO: 157103 - RNA, 12 nt, Artificial Sequence
  Description of Artificial Sequence: Synthetic oligonucleotide
agaguucaaaag

SEQ ID NO: 157104 - RNA, 12 nt, Artificial Sequence
  Description of Artificial Sequence: Synthetic oligonucleotide
gaguucaaaagc

SEQ ID NO: 157105 - RNA, 11 nt, Artificial Sequence
  Description of Artificial Sequence: Synthetic oligonucleotide
ucaaaagcccu

SEQ ID NO: 157106 - RNA, 11 nt, Artificial Sequence
  Description of Artificial Sequence: Synthetic oligonucleotide
caaaagcccuu

SEQ ID NO: 157107 - RNA, 11 nt, Artificial Sequence
  Description of Artificial Sequence: Synthetic oligonucleotide
aaagcccuuca

SEQ ID NO: 157108 - RNA, 11 nt, Artificial Sequence
  Description of Artificial Sequence: Synthetic oligonucleotide
aagcccuucag

SEQ ID NO: 157109 - RNA, 12 nt, Artificial Sequence
  Description of Artificial Sequence: Synthetic oligonucleotide
ugaagccgcucg

SEQ ID NO: 157110 - RNA, 11 nt, Artificial Sequence
  Description of Artificial Sequence: Synthetic oligonucleotide
acgccagucaa

SEQ ID NO: 157111 - RNA, 12 nt, Artificial Sequence
  Description of Artificial Sequence: Synthetic oligonucleotide
ucuuggugcgug

SEQ ID NO: 157112 - RNA, 13 nt, Artificial Sequence
  Description of Artificial Sequence: Synthetic oligonucleotide
uuggauucaucag

SEQ ID NO: 157113 - RNA, 12 nt, Artificial Sequence
  Description of Artificial Sequence: Synthetic oligonucleotide
ggaauaccuaag

SEQ ID NO: 157114 - RNA, 11 nt, Artificial Sequence
  Description of Artificial Sequence: Synthetic oligonucleotide
uuugaggcuca

SEQ ID NO: 157115 - RNA, 10 nt, Artificial Sequence
  Description of Artificial Sequence: Synthetic oligonucleotide
cuacaauugg

SEQ ID NO: 157116 - RNA, 11 nt, Artificial Sequence
  Description of Artificial Sequence: Synthetic oligonucleotide
aguuaggagcc

SEQ ID NO: 157117 - RNA, 12 nt, Artificial Sequence
  Description of Artificial Sequence: Synthetic oligonucleotide
gucaauauccac

SEQ ID NO: 157118 - RNA, 12 nt, Artificial Sequence
  Description of Artificial Sequence: Synthetic oligonucleotide
uguucagucaca

SEQ ID NO: 157119 - RNA, 11 nt, Artificial Sequence
  Description of Artificial Sequence: Synthetic oligonucleotide
cacacacauac

SEQ ID NO: 157120 - RNA, 11 nt, Artificial Sequence
  Description of Artificial Sequence: Synthetic oligonucleotide
uccuuuugcuu

SEQ ID NO: 157121 - RNA, 15 nt, Artificial Sequence
  Description of Artificial Sequence: Synthetic oligonucleotide
uuuaaaguaauuuuu

SEQ ID NO: 157122 - RNA, 12 nt, Artificial Sequence
  Description of Artificial Sequence: Synthetic oligonucleotide
aacagucaaugg

SEQ ID NO: 157123 - RNA, 12 nt, Artificial Sequence
  Description of Artificial Sequence: Synthetic oligonucleotide
cgacaaaccaau

SEQ ID NO: 157124 - RNA, 11 nt, Artificial Sequence
  Description of Artificial Sequence: Synthetic oligonucleotide
cugcuaccacu

SEQ ID NO: 157125 - RNA, 12 nt, Artificial Sequence
  Description of Artificial Sequence: Synthetic oligonucleotide
caagcggucuua

SEQ ID NO: 157126 - RNA, 12 nt, Artificial Sequence
  Description of Artificial Sequence: Synthetic oligonucleotide
gucuuaccggcu

SEQ ID NO: 157127 - RNA, 10 nt, Artificial Sequence
  Description of Artificial Sequence: Synthetic oligonucleotide
auggguuacc

SEQ ID NO: 157128 - RNA, 10 nt, Artificial Sequence
  Description of Artificial Sequence: Synthetic oligonucleotide
uuaccugcga

SEQ ID NO: 157129 - RNA, 11 nt, Artificial Sequence
  Description of Artificial Sequence: Synthetic oligonucleotide
aucuugcugag

SEQ ID NO: 157130 - RNA, 12 nt, Artificial Sequence
  Description of Artificial Sequence: Synthetic oligonucleotide
gcauaaaacagu

SEQ ID NO: 157131 - RNA, 11 nt, Artificial Sequence
  Description of Artificial Sequence: Synthetic oligonucleotide
uccuuuauccu

SEQ ID NO: 157132 - RNA, 11 nt, Artificial Sequence
  Description of Artificial Sequence: Synthetic oligonucleotide
aacgcaaguug

SEQ ID NO: 157133 - RNA, 12 nt, Artificial Sequence
  Description of Artificial Sequence: Synthetic oligonucleotide
aacugaaaccau

SEQ ID NO: 157134 - RNA, 13 nt, Artificial Sequence
  Description of Artificial Sequence: Synthetic oligonucleotide
cuuuguuaaauau

SEQ ID NO: 157135 - RNA, 13 nt, Artificial Sequence
  Description of Artificial Sequence: Synthetic oligonucleotide
uauauuaaaaguu

SEQ ID NO: 157136 - RNA, 12 nt, Artificial Sequence
  Description of Artificial Sequence: Synthetic oligonucleotide
uuuugacuuaac

SEQ ID NO: 157137 - RNA, 12 nt, Artificial Sequence
  Description of Artificial Sequence: Synthetic oligonucleotide
caaacucagcac

SEQ ID NO: 157138 - RNA, 10 nt, Artificial Sequence
  Description of Artificial Sequence: Synthetic oligonucleotide
gcugaccuca

SEQ ID NO: 157139 - RNA, 13 nt, Artificial Sequence
  Description of Artificial Sequence: Synthetic oligonucleotide
uuauucagaucgc

SEQ ID NO: 157140 - RNA, 12 nt, Artificial Sequence
  Description of Artificial Sequence: Synthetic oligonucleotide
ggguucugggau

SEQ ID NO: 157141 - RNA, 14 nt, Artificial Sequence
  Description of Artificial Sequence: Synthetic oligonucleotide
uauuggaaauuaug

SEQ ID NO: 157142 - RNA, 12 nt, Artificial Sequence
  Description of Artificial Sequence: Synthetic oligonucleotide
uggaagcacuag

SEQ ID NO: 157143 - RNA, 12 nt, Artificial Sequence
  Description of Artificial Sequence: Synthetic oligonucleotide
uuuuuaugugga

SEQ ID NO: 157144 - RNA, 11 nt, Artificial Sequence
  Description of Artificial Sequence: Synthetic oligonucleotide
gaauugguaga

SEQ ID NO: 157145 - RNA, 12 nt, Artificial Sequence
  Description of Artificial Sequence: Synthetic oligonucleotide
uagacuuggaga

SEQ ID NO: 157146 - RNA, 12 nt, Artificial Sequence
  Description of Artificial Sequence: Synthetic oligonucleotide
uacaguauucca

SEQ ID NO: 157147 - RNA, 14 nt, Artificial Sequence
  Description of Artificial Sequence: Synthetic oligonucleotide
cacugaugaauuaa

SEQ ID NO: 157148 - RNA, 11 nt, Artificial Sequence
  Description of Artificial Sequence: Synthetic oligonucleotide
cacaucaucac

SEQ ID NO: 157149 - RNA, 12 nt, Artificial Sequence
  Description of Artificial Sequence: Synthetic oligonucleotide
ucaccaaacaga

SEQ ID NO: 157150 - RNA, 11 nt, Artificial Sequence
  Description of Artificial Sequence: Synthetic oligonucleotide
gaacaugaugg

SEQ ID NO: 157151 - RNA, 11 nt, Artificial Sequence
  Description of Artificial Sequence: Synthetic oligonucleotide
auguagacugc

SEQ ID NO: 157152 - RNA, 12 nt, Artificial Sequence
  Description of Artificial Sequence: Synthetic oligonucleotide
gaucuauuuaug

SEQ ID NO: 157153 - RNA, 11 nt, Artificial Sequence
  Description of Artificial Sequence: Synthetic oligonucleotide
cacuauuauca

SEQ ID NO: 157154 - RNA, 10 nt, Artificial Sequence
  Description of Artificial Sequence: Synthetic oligonucleotide
ucaguucugc

SEQ ID NO: 157155 - RNA, 12 nt, Artificial Sequence
  Description of Artificial Sequence: Synthetic oligonucleotide
gauuaaaccuac

SEQ ID NO: 157156 - RNA, 12 nt, Artificial Sequence
  Description of Artificial Sequence: Synthetic oligonucleotide
uaaaauccuucu

SEQ ID NO: 157157 - RNA, 11 nt, Artificial Sequence
  Description of Artificial Sequence: Synthetic oligonucleotide
augcuguagac

SEQ ID NO: 157158 - RNA, 12 nt, Artificial Sequence
  Description of Artificial Sequence: Synthetic oligonucleotide
ugauaggaauag

SEQ ID NO: 157159 - RNA, 10 nt, Artificial Sequence
  Description of Artificial Sequence: Synthetic oligonucleotide
auggcccuga

SEQ ID NO: 157160 - RNA, 10 nt, Artificial Sequence
  Description of Artificial Sequence: Synthetic oligonucleotide
uccucaagca

SEQ ID NO: 157161 - RNA, 9 nt, Artificial Sequence
  Description of Artificial Sequence: Synthetic oligonucleotide
uucagccca

SEQ ID NO: 157162 - RNA, 10 nt, Artificial Sequence
  Description of Artificial Sequence: Synthetic oligonucleotide
cugcugaacc

SEQ ID NO: 157163 - RNA, 11 nt, Artificial Sequence
  Description of Artificial Sequence: Synthetic oligonucleotide
aguucucuuca

SEQ ID NO: 157164 - RNA, 10 nt, Artificial Sequence
  Description of Artificial Sequence: Synthetic oligonucleotide
cagccuagag

SEQ ID NO: 157165 - RNA, 12 nt, Artificial Sequence
  Description of Artificial Sequence: Synthetic oligonucleotide
ucugugaagugu

SEQ ID NO: 157166 - RNA, 13 nt, Artificial Sequence
  Description of Artificial Sequence: Synthetic oligonucleotide
gagaaaauuucaa

SEQ ID NO: 157167 - RNA, 10 nt, Artificial Sequence
  Description of Artificial Sequence: Synthetic oligonucleotide
auccuccuga

SEQ ID NO: 157168 - RNA, 11 nt, Artificial Sequence
  Description of Artificial Sequence: Synthetic oligonucleotide
ugacaucauau

SEQ ID NO: 157169 - RNA, 12 nt, Artificial Sequence
  Description of Artificial Sequence: Synthetic oligonucleotide
aucuucaucaua

SEQ ID NO: 157170 - RNA, 12 nt, Artificial Sequence
  Description of Artificial Sequence: Synthetic oligonucleotide
acuagcuauuaa

SEQ ID NO: 157171 - RNA, 13 nt, Artificial Sequence
  Description of Artificial Sequence: Synthetic oligonucleotide
cucuacuaaaaau

SEQ ID NO: 157172 - RNA, 11 nt, Artificial Sequence
  Description of Artificial Sequence: Synthetic oligonucleotide
cuaucucgccu

SEQ ID NO: 157173 - RNA, 12 nt, Artificial Sequence
  Description of Artificial Sequence: Synthetic oligonucleotide
uucgguccaguu

SEQ ID NO: 157174 - RNA, 10 nt, Artificial Sequence
  Description of Artificial Sequence: Synthetic oligonucleotide
auguagccgc

SEQ ID NO: 157175 - RNA, 11 nt, Artificial Sequence
  Description of Artificial Sequence: Synthetic oligonucleotide
gaggagacuug

SEQ ID NO: 157176 - RNA, 11 nt, Artificial Sequence
  Description of Artificial Sequence: Synthetic oligonucleotide
aguagugagga

SEQ ID NO: 157177 - RNA, 13 nt, Artificial Sequence
  Description of Artificial Sequence: Synthetic oligonucleotide
agaugaguacaaa

SEQ ID NO: 157178 - RNA, 12 nt, Artificial Sequence
  Description of Artificial Sequence: Synthetic oligonucleotide
uuguuaaugggc

SEQ ID NO: 157179 - RNA, 12 nt, Artificial Sequence
  Description of Artificial Sequence: Synthetic oligonucleotide
uuuuaauuuauu

SEQ ID NO: 157180 - RNA, 11 nt, Artificial Sequence
  Description of Artificial Sequence: Synthetic oligonucleotide
auuuaaauaug

SEQ ID NO: 157181 - RNA, 12 nt, Artificial Sequence
  Description of Artificial Sequence: Synthetic oligonucleotide
auccuuuguuuc

SEQ ID NO: 157182 - RNA, 13 nt, Artificial Sequence
  Description of Artificial Sequence: Synthetic oligonucleotide
gucuaaguguuug

SEQ ID NO: 157183 - RNA, 11 nt, Artificial Sequence
  Description of Artificial Sequence: Synthetic oligonucleotide
ccugugacaaa

SEQ ID NO: 157184 - RNA, 12 nt, Artificial Sequence
  Description of Artificial Sequence: Synthetic oligonucleotide
caggcugaauua

SEQ ID NO: 157185 - RNA, 13 nt, Artificial Sequence
  Description of Artificial Sequence: Synthetic oligonucleotide
ucauucuuacaau

SEQ ID NO: 157186 - RNA, 14 nt, Artificial Sequence
  Description of Artificial Sequence: Synthetic oligonucleotide
cauucuuacaauug

SEQ ID NO: 157187 - RNA, 11 nt, Artificial Sequence
  Description of Artificial Sequence: Synthetic oligonucleotide
agagaguguac

SEQ ID NO: 157188 - RNA, 11 nt, Artificial Sequence
  Description of Artificial Sequence: Synthetic oligonucleotide
gaacucagcag

SEQ ID NO: 157189 - RNA, 12 nt, Artificial Sequence
  Description of Artificial Sequence: Synthetic oligonucleotide
uuauuuucagua

SEQ ID NO: 157190 - RNA, 11 nt, Artificial Sequence
  Description of Artificial Sequence: Synthetic oligonucleotide
cuuaaauggaa

SEQ ID NO: 157191 - RNA, 12 nt, Artificial Sequence
  Description of Artificial Sequence: Synthetic oligonucleotide
gccuaaaauugu

SEQ ID NO: 157192 - RNA, 12 nt, Artificial Sequence
  Description of Artificial Sequence: Synthetic oligonucleotide
acuaacaucugg

SEQ ID NO: 157193 - RNA, 11 nt, Artificial Sequence
  Description of Artificial Sequence: Synthetic oligonucleotide
gacugugagcu

SEQ ID NO: 157194 - RNA, 13 nt, Artificial Sequence
  Description of Artificial Sequence: Synthetic oligonucleotide
gcuuuuuauuaau

SEQ ID NO: 157195 - RNA, 12 nt, Artificial Sequence
  Description of Artificial Sequence: Synthetic oligonucleotide
ucuucuuacauu

SEQ ID NO: 157196 - RNA, 14 nt, Artificial Sequence
  Description of Artificial Sequence: Synthetic oligonucleotide
auuuguaaaaaugu

SEQ ID NO: 157197 - RNA, 14 nt, Artificial Sequence
  Description of Artificial Sequence: Synthetic oligonucleotide
ucuuaauucauauu

SEQ ID NO: 157198 - RNA, 12 nt, Artificial Sequence
  Description of Artificial Sequence: Synthetic oligonucleotide
aacuaaucauga

SEQ ID NO: 157199 - RNA, 11 nt, Artificial Sequence
  Description of Artificial Sequence: Synthetic oligonucleotide
cugcucuuggg

SEQ ID NO: 157200 - RNA, 12 nt, Artificial Sequence
  Description of Artificial Sequence: Synthetic oligonucleotide
aguagcuuugag

SEQ ID NO: 157201 - RNA, 13 nt, Artificial Sequence
  Description of Artificial Sequence: Synthetic oligonucleotide
acguaauauuuca

SEQ ID NO: 157202 - RNA, 12 nt, Artificial Sequence
  Description of Artificial Sequence: Synthetic oligonucleotide
auucucuucacu

SEQ ID NO: 157203 - RNA, 13 nt, Artificial Sequence
  Description of Artificial Sequence: Synthetic oligonucleotide
uaaugcuaagaaa

SEQ ID NO: 157204 - RNA, 11 nt, Artificial Sequence
  Description of Artificial Sequence: Synthetic oligonucleotide
cugaaaaucaa

SEQ ID NO: 157205 - RNA, 13 nt, Artificial Sequence
  Description of Artificial Sequence: Synthetic oligonucleotide
auaugauuacuuu

SEQ ID NO: 157206 - RNA, 13 nt, Artificial Sequence
  Description of Artificial Sequence: Synthetic oligonucleotide
auuuuguucuaca

SEQ ID NO: 157207 - RNA, 11 nt, Artificial Sequence
  Description of Artificial Sequence: Synthetic oligonucleotide
ccgggacucuc

SEQ ID NO: 157208 - RNA, 13 nt, Artificial Sequence
  Description of Artificial Sequence: Synthetic oligonucleotide
cuuuaaaguaaag

SEQ ID NO: 157209 - RNA, 12 nt, Artificial Sequence
  Description of Artificial Sequence: Synthetic oligonucleotide
cuggaagccugg

SEQ ID NO: 157210 - RNA, 13 nt, Artificial Sequence
  Description of Artificial Sequence: Synthetic oligonucleotide
aaacaaaagagag

SEQ ID NO: 157211 - RNA, 12 nt, Artificial Sequence
  Description of Artificial Sequence: Synthetic oligonucleotide
ucaguuaugccg

SEQ ID NO: 157212 - RNA, 12 nt, Artificial Sequence
  Description of Artificial Sequence: Synthetic oligonucleotide
aaaagaagucca

SEQ ID NO: 157213 - RNA, 10 nt, Artificial Sequence
  Description of Artificial Sequence: Synthetic oligonucleotide
ggugagguua

SEQ ID NO: 157214 - RNA, 10 nt, Artificial Sequence
  Description of Artificial Sequence: Synthetic oligonucleotide
ggaagaggac

SEQ ID NO: 157215 - RNA, 12 nt, Artificial Sequence
  Description of Artificial Sequence: Synthetic oligonucleotide
agcaaguauugu

SEQ ID NO: 157216 - RNA, 11 nt, Artificial Sequence
  Description of Artificial Sequence: Synthetic oligonucleotide
uuguagcacuc

SEQ ID NO: 157217 - RNA, 13 nt, Artificial Sequence
  Description of Artificial Sequence: Synthetic oligonucleotide
caaaaccacaaau

SEQ ID NO: 157218 - RNA, 11 nt, Artificial Sequence
  Description of Artificial Sequence: Synthetic oligonucleotide
aagcccauaca

SEQ ID NO: 157219 - RNA, 10 nt, Artificial Sequence
  Description of Artificial Sequence: Synthetic oligonucleotide
gcccauacag

SEQ ID NO: 157220 - RNA, 11 nt, Artificial Sequence
  Description of Artificial Sequence: Synthetic oligonucleotide
agaaaccuucc

SEQ ID NO: 157221 - RNA, 9 nt, Artificial Sequence
  Description of Artificial Sequence: Synthetic oligonucleotide
uauaccuac

SEQ ID NO: 157222 - RNA, 12 nt, Artificial Sequence
  Description of Artificial Sequence: Synthetic oligonucleotide
ccaguuuucgga

SEQ ID NO: 157223 - RNA, 8 nt, Artificial Sequence
  Description of Artificial Sequence: Synthetic oligonucleotide
gaacaggg

SEQ ID NO: 157224 - RNA, 12 nt, Artificial Sequence
  Description of Artificial Sequence: Synthetic oligonucleotide
uaacuuuccagu

SEQ ID NO: 157225 - RNA, 13 nt, Artificial Sequence
  Description of Artificial Sequence: Synthetic oligonucleotide
aaguuugguuuug

SEQ ID NO: 157226 - RNA, 11 nt, Artificial Sequence
  Description of Artificial Sequence: Synthetic oligonucleotide
uucccacugua

SEQ ID NO: 157227 - RNA, 12 nt, Artificial Sequence
  Description of Artificial Sequence: Synthetic oligonucleotide
gauaccauauga

SEQ ID NO: 157228 - RNA, 10 nt, Artificial Sequence
  Description of Artificial Sequence: Synthetic oligonucleotide
acaugggcug

SEQ ID NO: 157229 - RNA, 12 nt, Artificial Sequence
  Description of Artificial Sequence: Synthetic oligonucleotide
aacuuuuucaua

SEQ ID NO: 157230 - RNA, 11 nt, Artificial Sequence
  Description of Artificial Sequence: Synthetic oligonucleotide
augaggccgga

SEQ ID NO: 157231 - RNA, 10 nt, Artificial Sequence
  Description of Artificial Sequence: Synthetic oligonucleotide
cugcauuugu

SEQ ID NO: 157232 - RNA, 12 nt, Artificial Sequence
  Description of Artificial Sequence: Synthetic oligonucleotide
auguuuacuacc

SEQ ID NO: 157233 - RNA, 14 nt, Artificial Sequence
  Description of Artificial Sequence: Synthetic oligonucleotide
auuuuuugaugaaa

SEQ ID NO: 157234 - RNA, 13 nt, Artificial Sequence
  Description of Artificial Sequence: Synthetic oligonucleotide
agugugugaauuu

SEQ ID NO: 157235 - RNA, 12 nt, Artificial Sequence
  Description of Artificial Sequence: Synthetic oligonucleotide
agcaauguaugu

SEQ ID NO: 157236 - RNA, 13 nt, Artificial Sequence
  Description of Artificial Sequence: Synthetic oligonucleotide
aagcacauauaua

SEQ ID NO: 157237 - RNA, 13 nt, Artificial Sequence
  Description of Artificial Sequence: Synthetic oligonucleotide
uaauaguuucucc

SEQ ID NO: 157238 - RNA, 12 nt, Artificial Sequence
  Description of Artificial Sequence: Synthetic oligonucleotide
guuucuccaaau

SEQ ID NO: 157239 - RNA, 12 nt, Artificial Sequence
  Description of Artificial Sequence: Synthetic oligonucleotide
acuuccuagaaa

SEQ ID NO: 157240 - RNA, 12 nt, Artificial Sequence
  Description of Artificial Sequence: Synthetic oligonucleotide
acaccauauaug

SEQ ID NO: 157241 - RNA, 13 nt, Artificial Sequence
  Description of Artificial Sequence: Synthetic oligonucleotide
uauaugaauggag

SEQ ID NO: 157242 - RNA, 12 nt, Artificial Sequence
  Description of Artificial Sequence: Synthetic oligonucleotide
cauuuacaggga

SEQ ID NO: 157243 - RNA, 12 nt, Artificial Sequence
  Description of Artificial Sequence: Synthetic oligonucleotide
auuuacagggac

SEQ ID NO: 157244 - RNA, 9 nt, Artificial Sequence
  Description of Artificial Sequence: Synthetic oligonucleotide
gggaccuga

SEQ ID NO: 157245 - RNA, 13 nt, Artificial Sequence
  Description of Artificial Sequence: Synthetic oligonucleotide
guuugacugcauc

SEQ ID NO: 157246 - RNA, 12 nt, Artificial Sequence
  Description of Artificial Sequence: Synthetic oligonucleotide
uugacugcaucg

SEQ ID NO: 157247 - RNA, 11 nt, Artificial Sequence
  Description of Artificial Sequence: Synthetic oligonucleotide
aguucacaggg

SEQ ID NO: 157248 - RNA, 12 nt, Artificial Sequence
  Description of Artificial Sequence: Synthetic oligonucleotide
gcaccucugucc

SEQ ID NO: 157249 - RNA, 14 nt, Artificial Sequence
  Description of Artificial Sequence: Synthetic oligonucleotide
guuugucuuuuuaa

SEQ ID NO: 157250 - RNA, 13 nt, Artificial Sequence
  Description of Artificial Sequence: Synthetic oligonucleotide
uugucuuuuuaag

SEQ ID NO: 157251 - RNA, 12 nt, Artificial Sequence
  Description of Artificial Sequence: Synthetic oligonucleotide
cuaaagguuguc

SEQ ID NO: 157252 - RNA, 11 nt, Artificial Sequence
  Description of Artificial Sequence: Synthetic oligonucleotide
agguugucgac

SEQ ID NO: 157253 - RNA, 12 nt, Artificial Sequence
  Description of Artificial Sequence: Synthetic oligonucleotide
ccuggcaauugu

SEQ ID NO: 157254 - RNA, 11 nt, Artificial Sequence
  Description of Artificial Sequence: Synthetic oligonucleotide
guggugcgagg

SEQ ID NO: 157255 - RNA, 12 nt, Artificial Sequence
  Description of Artificial Sequence: Synthetic oligonucleotide
gagacaugaaau

SEQ ID NO: 157256 - RNA, 12 nt, Artificial Sequence
  Description of Artificial Sequence: Synthetic oligonucleotide
uauauuucucca

SEQ ID NO: 157257 - RNA, 9 nt, Artificial Sequence
  Description of Artificial Sequence: Synthetic oligonucleotide
augaaggcu

SEQ ID NO: 157258 - RNA, 10 nt, Artificial Sequence
  Description of Artificial Sequence: Synthetic oligonucleotide
cuggaguggu

SEQ ID NO: 157259 - RNA, 10 nt, Artificial Sequence
  Description of Artificial Sequence: Synthetic oligonucleotide
ggaagagagg

SEQ ID NO: 157260 - RNA, 11 nt, Artificial Sequence
  Description of Artificial Sequence: Synthetic oligonucleotide
uugcaucgggc

SEQ ID NO: 157261 - RNA, 12 nt, Artificial Sequence
  Description of Artificial Sequence: Synthetic oligonucleotide
uauccuacugug

SEQ ID NO: 157262 - RNA, 12 nt, Artificial Sequence
  Description of Artificial Sequence: Synthetic oligonucleotide
ccuacuguguaa

SEQ ID NO: 157263 - RNA, 11 nt, Artificial Sequence
  Description of Artificial Sequence: Synthetic oligonucleotide
cuuguagugua

SEQ ID NO: 157264 - RNA, 12 nt, Artificial Sequence
  Description of Artificial Sequence: Synthetic oligonucleotide
cuuuguugauug

SEQ ID NO: 157265 - RNA, 13 nt, Artificial Sequence
  Description of Artificial Sequence: Synthetic oligonucleotide
uuguugauugaaa

SEQ ID NO: 157266 - RNA, 14 nt, Artificial Sequence
  Description of Artificial Sequence: Synthetic oligonucleotide
ucuuuuucuuccau

SEQ ID NO: 157267 - RNA, 12 nt, Artificial Sequence
  Description of Artificial Sequence: Synthetic oligonucleotide
aucuuccuucua

SEQ ID NO: 157268 - RNA, 12 nt, Artificial Sequence
  Description of Artificial Sequence: Synthetic oligonucleotide
ugaaugcuucau

SEQ ID NO: 157269 - RNA, 12 nt, Artificial Sequence
  Description of Artificial Sequence: Synthetic oligonucleotide
gaaugcuucaug

SEQ ID NO: 157270 - RNA, 12 nt, Artificial Sequence
  Description of Artificial Sequence: Synthetic oligonucleotide
auucuacuuuga

SEQ ID NO: 157271 - RNA, 12 nt, Artificial Sequence
  Description of Artificial Sequence: Synthetic oligonucleotide
gcaacuacagac

SEQ ID NO: 157272 - RNA, 12 nt, Artificial Sequence
  Description of Artificial Sequence: Synthetic oligonucleotide
accaaggucaac

SEQ ID NO: 157273 - RNA, 12 nt, Artificial Sequence
  Description of Artificial Sequence: Synthetic oligonucleotide
gacuaucucgac

SEQ ID NO: 157274 - RNA, 12 nt, Artificial Sequence
  Description of Artificial Sequence: Synthetic oligonucleotide
accuucccaaac

SEQ ID NO: 157275 - RNA, 13 nt, Artificial Sequence
  Description of Artificial Sequence: Synthetic oligonucleotide
caagcuuagaacu

SEQ ID NO: 157276 - RNA, 14 nt, Artificial Sequence
  Description of Artificial Sequence: Synthetic oligonucleotide
gcuuagaacuuuaa

SEQ ID NO: 157277 - RNA, 13 nt, Artificial Sequence
  Description of Artificial Sequence: Synthetic oligonucleotide
aacuuuaagcaac

SEQ ID NO: 157278 - RNA, 10 nt, Artificial Sequence
  Description of Artificial Sequence: Synthetic oligonucleotide
agaccaccac

SEQ ID NO: 157279 - RNA, 13 nt, Artificial Sequence
  Description of Artificial Sequence: Synthetic oligonucleotide
cgagaaauaaagu

SEQ ID NO: 157280 - RNA, 13 nt, Artificial Sequence
  Description of Artificial Sequence: Synthetic oligonucleotide
gagaaauaaaguu

SEQ ID NO: 157281 - RNA, 11 nt, Artificial Sequence
  Description of Artificial Sequence: Synthetic oligonucleotide
ggaaaugaucc

SEQ ID NO: 157282 - RNA, 12 nt, Artificial Sequence
  Description of Artificial Sequence: Synthetic oligonucleotide
aagaaaugaaac

SEQ ID NO: 157283 - RNA, 12 nt, Artificial Sequence
  Description of Artificial Sequence: Synthetic oligonucleotide
uuuccauccucc

SEQ ID NO: 157284 - RNA, 14 nt, Artificial Sequence
  Description of Artificial Sequence: Synthetic oligonucleotide
cugaaaaucuuuga

SEQ ID NO: 157285 - RNA, 10 nt, Artificial Sequence
  Description of Artificial Sequence: Synthetic oligonucleotide
gccguucagg

SEQ ID NO: 157286 - RNA, 12 nt, Artificial Sequence
  Description of Artificial Sequence: Synthetic oligonucleotide
aggguccagaag

SEQ ID NO: 157287 - RNA, 12 nt, Artificial Sequence
  Description of Artificial Sequence: Synthetic oligonucleotide
caagacugcuug

SEQ ID NO: 157288 - RNA, 12 nt, Artificial Sequence
  Description of Artificial Sequence: Synthetic oligonucleotide
ccaugucuuugg

SEQ ID NO: 157289 - RNA, 10 nt, Artificial Sequence
  Description of Artificial Sequence: Synthetic oligonucleotide
ccugaaacac

SEQ ID NO: 157290 - RNA, 11 nt, Artificial Sequence
  Description of Artificial Sequence: Synthetic oligonucleotide
cucuguaccuc

SEQ ID NO: 157291 - RNA, 11 nt, Artificial Sequence
  Description of Artificial Sequence: Synthetic oligonucleotide
gcaagacaaga

SEQ ID NO: 157292 - RNA, 12 nt, Artificial Sequence
  Description of Artificial Sequence: Synthetic oligonucleotide
caagacaagaaa

SEQ ID NO: 157293 - RNA, 11 nt, Artificial Sequence
  Description of Artificial Sequence: Synthetic oligonucleotide
guacaagaucc

SEQ ID NO: 157294 - RNA, 11 nt, Artificial Sequence
  Description of Artificial Sequence: Synthetic oligonucleotide
guacuugcaga

SEQ ID NO: 157295 - RNA, 12 nt, Artificial Sequence
  Description of Artificial Sequence: Synthetic oligonucleotide
gaucgauacaga

SEQ ID NO: 157296 - RNA, 12 nt, Artificial Sequence
  Description of Artificial Sequence: Synthetic oligonucleotide
auaaaaauaaau

SEQ ID NO: 157297 - RNA, 12 nt, Artificial Sequence
  Description of Artificial Sequence: Synthetic oligonucleotide
aaaaauaaauau

SEQ ID NO: 157298 - RNA, 12 nt, Artificial Sequence
  Description of Artificial Sequence: Synthetic oligonucleotide
uugacugcugug

SEQ ID NO: 157299 - RNA, 12 nt, Artificial Sequence
  Description of Artificial Sequence: Synthetic oligonucleotide
gagaugagagac

SEQ ID NO: 157300 - RNA, 9 nt, Artificial Sequence
  Description of Artificial Sequence: Synthetic oligonucleotide
cccacuugg

SEQ ID NO: 157301 - RNA, 3318 nt, Homo sapiens
gugaugcguaguuccggcugccgguugacaugaagaagcagcagcggcuagggcggcgguagcugcaggggucggggauugcagcgggccucggggcuaagagcgcgacgcggccuagagcggcagacggcgcagugggccgagaaggaggcgcagcagccgcccuggcccgucauggagauggaaaaggaguucgagcagaucgacaaguccgggagcugggcggccauuuaccaggauauccgacaugaagccagugacuucccauguagaguggccaagcuuccuaagaacaaaaaccgaaauagguacagagacgucagucccuuugaccauagucggauuaaacuacaucaagaagauaaugacuauaucaacgcuaguuugauaaaaauggaagaagcccaaaggaguuacauucuuacccagggcccuuugccuaacacaugcggucacuuuugggagauggugugggagcagaaaagcaggggugucgucaugcucaacagagugauggagaaagguucguuaaaaugcgcacaauacuggccacaaaaagaagaaaaagagaugaucuuugaagacacaaauuugaaauuaacauugaucucugaagauaucaagucauauuauacagugcgacagcuagaauuggaaaaccuuacaacccaagaaacucgagagaucuuacauuuccacuauaccacauggccugacuuuggagucccugaaucaccagccucauucuugaacuuucuuuucaaaguccgagagucagggucacucagcccggagcacgggcccguuguggugcacugcagugcaggcaucggcaggucuggaaccuucugucuggcugauaccugccucuugcugauggacaagaggaaagacccuucuuccguugauaucaagaaagugcuguuagaaaugaggaaguuucggauggggcugauccagacagccgaccagcugcgcuucuccuaccuggcugugaucgaaggugccaaauucaucaugggggacucuuccgugcaggaucaguggaaggagcuuucccacgaggaccuggagcccccacccgagcauauccccccaccuccccggccacccaaacgaauccuggagccacacaaugggaaaugcagggaguucuucccaaaucaccagugggugaaggaagagacccaggaggauaaagacugccccaucaaggaagaaaaaggaagccccuuaaaugccgcacccuacggcaucgaaagcaugagucaagacacugaaguuagaagucgggucguggggggaagucuucgaggugcccaggcugccuccccagccaaaggggagccgucacugcccgagaaggacgaggaccaugcacugaguuacuggaagcccuuccuggucaacaugugcguggcuacgguccucacggccggcgcuuaccucugcuacagguuccuguucaacagcaacacauagccugacccuccuccacuccaccuccacccacuguccgccucugcccgcagagcccacgcccgacuagcaggcaugccgcgguagguaagggccgccggaccgcguagagagccgggccccggacggacguugguucugcacuaaaacccaucuuccccggaugugugucucaccccucauccuuuuacuuuuugccccuuccacuuugaguaccaaauccacaagccauuuuuugaggagagugaaagagaguaccaugcuggcggcgcagagggaaggggccuacacccgucuuggggcucgccccacccagggcucccuccuggagcaucccaggcgggcggcacgccaacagccccccccuugaaucugcagggagcaacucuccacuccauauuuauuuaaacaauuuuuuccccaaaggcauccauagugcacuagcauuuucuugaaccaauaauguauuaaaauuuuuugaugucagccuugcaucaagggcuuuaucaaaaaguacaauaauaaauccucagguaguacugggaauggaaggcuuugccaugggccugcugcgucagaccaguacugggaaggaggacgguuguaagcaguuguuauuuagugauauuguggguaacgugagaagauagaacaaugcuauaauauauaaugaacacguggguauuuaauaagaaacaugaugugagauuacuuugucccgcuuauucuccucccuguuaucugcuagaucuaguucucaaucacugcucccccguguguauuagaaugcauguaaggucuucuuguguccugaugaaaaauaugugcuugaaaugagaaacuuugaucucugcuuacuaaugugccccauguccaaguccaaccugccugugcaugaccugaucauuacauggcugugguuccuaagccuguugcugaagucauugucgcucagcaauagggugcaguuuuccaggaauaggcauuugccuaauuccuggcaugacacucuagugacuuccuggugaggcccagccuguccugguacagcagggucuugcuguaacucagacauuccaaggguaugggaagccauauucacaccucacgcucuggacaugauuuagggaagcagggacaccccccgccccccaccuuugggaucagccuccgccauuccaagucaacacucuucuugagcagaccgugauuuggaagagaggcaccugcuggaaaccacacuucuugaaacagccugggugacgguccuuuaggcagccugccgccgucucugucccgguucaccuugccgagagaggcgcgucugccccacccucaaacccuguggggccugauggugcucacgacucuuccugcaaagggaacugaagaccuccacauuaaguggcuuuuuaacaugaaaaacacggcagcuguagcucccgagcuacucucuugccagcauuuucacauuuugccuuucucgugguagaagccaguacagagaaauucuguggugggaacauucgaggugucacccugcagagcuauggugagguguggauaaggcuuaggugccaggcuguaagcauucugagcugggcuuguuguuuuuaaguccuguauauguauguaguaguuuggguguguauauauaguagcauuucaaaauggacguacugguuuaaccuccuauccuuggagagcagcuggcucuccaccuuguuacacauuauguuagagagguagcgagcugcucugcuauaugccuuaagccaauauuuacucaucaggucauuauuuuuuacaauggccauggaauaaaccauuuuuacaaaa

SEQ ID NO: 157302 - RNA, 19 nt, Artificial Sequence
  Description of Artificial Sequence: Synthetic oligonucleotide
gugaugcguaguuccggcu

SEQ ID NO: 157303 - RNA, 19 nt, Artificial Sequence
  Description of Artificial Sequence: Synthetic oligonucleotide
ugccgguugacaugaagaa

SEQ ID NO: 157304 - RNA, 19 nt, Artificial Sequence
  Description of Artificial Sequence: Synthetic oligonucleotide
agcagcagcggcuagggcg

SEQ ID NO: 157305 - RNA, 19 nt, Artificial Sequence
  Description of Artificial Sequence: Synthetic oligonucleotide
ggcgguagcugcagggguc

SEQ ID NO: 157306 - RNA, 19 nt, Artificial Sequence
  Description of Artificial Sequence: Synthetic oligonucleotide
cggggauugcagcgggccu

SEQ ID NO: 157307 - RNA, 19 nt, Artificial Sequence
  Description of Artificial Sequence: Synthetic oligonucleotide
ucggggcuaagagcgcgac

SEQ ID NO: 157308 - RNA, 19 nt, Artificial Sequence
  Description of Artificial Sequence: Synthetic oligonucleotide
cgcggccuagagcggcaga

SEQ ID NO: 157309 - RNA, 19 nt, Artificial Sequence
  Description of Artificial Sequence: Synthetic oligonucleotide
acggcgcagugggccgaga

SEQ ID NO: 157310 - RNA, 19 nt, Artificial Sequence
  Description of Artificial Sequence: Synthetic oligonucleotide
aaggaggcgcagcagccgc

SEQ ID NO: 157311 - RNA, 19 nt, Artificial Sequence
  Description of Artificial Sequence: Synthetic oligonucleotide
cccuggcccgucauggaga

SEQ ID NO: 157312 - RNA, 19 nt, Artificial Sequence
  Description of Artificial Sequence: Synthetic oligonucleotide
auggaaaaggaguucgagc

SEQ ID NO: 157313 - RNA, 19 nt, Artificial Sequence
  Description of Artificial Sequence: Synthetic oligonucleotide
cagaucgacaaguccggga

SEQ ID NO: 157314 - RNA, 19 nt, Artificial Sequence
  Description of Artificial Sequence: Synthetic oligonucleotide
agcugggcggccauuuacc

SEQ ID NO: 157315 - RNA, 19 nt, Artificial Sequence
  Description of Artificial Sequence: Synthetic oligonucleotide
caggauauccgacaugaag

SEQ ID NO: 157316 - RNA, 19 nt, Artificial Sequence
  Description of Artificial Sequence: Synthetic oligonucleotide
gccagugacuucccaugua

SEQ ID NO: 157317 - RNA, 19 nt, Artificial Sequence
  Description of Artificial Sequence: Synthetic oligonucleotide
agaguggccaagcuuccua

SEQ ID NO: 157318 - RNA, 19 nt, Artificial Sequence
  Description of Artificial Sequence: Synthetic oligonucleotide
aagaacaaaaaccgaaaua

SEQ ID NO: 157319 - RNA, 19 nt, Artificial Sequence
  Description of Artificial Sequence: Synthetic oligonucleotide
agguacagagacgucaguc

SEQ ID NO: 157320 - RNA, 19 nt, Artificial Sequence
  Description of Artificial Sequence: Synthetic oligonucleotide
cccuuugaccauagucgga

SEQ ID NO: 157321 - RNA, 19 nt, Artificial Sequence
  Description of Artificial Sequence: Synthetic oligonucleotide
auuaaacuacaucaagaag

SEQ ID NO: 157322 - RNA, 19 nt, Artificial Sequence
  Description of Artificial Sequence: Synthetic oligonucleotide
gauaaugacuauaucaacg

SEQ ID NO: 157323 - RNA, 19 nt, Artificial Sequence
  Description of Artificial Sequence: Synthetic oligonucleotide
gcuaguuugauaaaaaugg

SEQ ID NO: 157324 - RNA, 19 nt, Artificial Sequence
  Description of Artificial Sequence: Synthetic oligonucleotide
gaagaagcccaaaggaguu

SEQ ID NO: 157325 - RNA, 19 nt, Artificial Sequence
  Description of Artificial Sequence: Synthetic oligonucleotide
uacauucuuacccagggcc

SEQ ID NO: 157326 - RNA, 19 nt, Artificial Sequence
  Description of Artificial Sequence: Synthetic oligonucleotide
ccuuugccuaacacaugcg

SEQ ID NO: 157327 - RNA, 19 nt, Artificial Sequence
  Description of Artificial Sequence: Synthetic oligonucleotide
ggucacuuuugggagaugg

SEQ ID NO: 157328 - RNA, 19 nt, Artificial Sequence
  Description of Artificial Sequence: Synthetic oligonucleotide
gugugggagcagaaaagca

SEQ ID NO: 157329 - RNA, 19 nt, Artificial Sequence
  Description of Artificial Sequence: Synthetic oligonucleotide
aggggugucgucaugcuca

SEQ ID NO: 157330 - RNA, 19 nt, Artificial Sequence
  Description of Artificial Sequence: Synthetic oligonucleotide
aacagagugauggagaaag

SEQ ID NO: 157331 - RNA, 19 nt, Artificial Sequence
  Description of Artificial Sequence: Synthetic oligonucleotide
gguucguuaaaaugcgcac

SEQ ID NO: 157332 - RNA, 19 nt, Artificial Sequence
  Description of Artificial Sequence: Synthetic oligonucleotide
caauacuggccacaaaaag

SEQ ID NO: 157333 - RNA, 19 nt, Artificial Sequence
  Description of Artificial Sequence: Synthetic oligonucleotide
gaagaaaaagagaugaucu

SEQ ID NO: 157334 - RNA, 19 nt, Artificial Sequence
  Description of Artificial Sequence: Synthetic oligonucleotide
uuugaagacacaaauuuga

SEQ ID NO: 157335 - RNA, 19 nt, Artificial Sequence
  Description of Artificial Sequence: Synthetic oligonucleotide
aaauuaacauugaucucug

SEQ ID NO: 157336 - RNA, 19 nt, Artificial Sequence
  Description of Artificial Sequence: Synthetic oligonucleotide
gaagauaucaagucauauu

SEQ ID NO: 157337 - RNA, 19 nt, Artificial Sequence
  Description of Artificial Sequence: Synthetic oligonucleotide
uauacagugcgacagcuag

SEQ ID NO: 157338 - RNA, 19 nt, Artificial Sequence
  Description of Artificial Sequence: Synthetic oligonucleotide
gaauuggaaaaccuuacaa

SEQ ID NO: 157339 - RNA, 19 nt, Artificial Sequence
  Description of Artificial Sequence: Synthetic oligonucleotide
acccaagaaacucgagaga

SEQ ID NO: 157340 - RNA, 19 nt, Artificial Sequence
  Description of Artificial Sequence: Synthetic oligonucleotide
aucuuacauuuccacuaua

SEQ ID NO: 157341 - RNA, 19 nt, Artificial Sequence
  Description of Artificial Sequence: Synthetic oligonucleotide
accacauggccugacuuug

SEQ ID NO: 157342 - RNA, 19 nt, Artificial Sequence
  Description of Artificial Sequence: Synthetic oligonucleotide
ggagucccugaaucaccag

SEQ ID NO: 157343 - RNA, 19 nt, Artificial Sequence
  Description of Artificial Sequence: Synthetic oligonucleotide
gccucauucuugaacuuuc

SEQ ID NO: 157344 - RNA, 19 nt, Artificial Sequence
  Description of Artificial Sequence: Synthetic oligonucleotide
cuuuucaaaguccgagagu

SEQ ID NO: 157345 - RNA, 19 nt, Artificial Sequence
  Description of Artificial Sequence: Synthetic oligonucleotide
ucagggucacucagcccgg

SEQ ID NO: 157346 - RNA, 19 nt, Artificial Sequence
  Description of Artificial Sequence: Synthetic oligonucleotide
gagcacgggcccguugugg

SEQ ID NO: 157347 - RNA, 19 nt, Artificial Sequence
  Description of Artificial Sequence: Synthetic oligonucleotide
gugcacugcagugcaggca

SEQ ID NO: 157348 - RNA, 19 nt, Artificial Sequence
  Description of Artificial Sequence: Synthetic oligonucleotide
aucggcaggucuggaaccu

SEQ ID NO: 157349 - RNA, 19 nt, Artificial Sequence
  Description of Artificial Sequence: Synthetic oligonucleotide
uucugucuggcugauaccu

SEQ ID NO: 157350 - RNA, 19 nt, Artificial Sequence
  Description of Artificial Sequence: Synthetic oligonucleotide
ugccucuugcugauggaca

SEQ ID NO: 157351 - RNA, 19 nt, Artificial Sequence
  Description of Artificial Sequence: Synthetic oligonucleotide
aagaggaaagacccuucuu

SEQ ID NO: 157352 - RNA, 19 nt, Artificial Sequence
  Description of Artificial Sequence: Synthetic oligonucleotide
uccguugauaucaagaaag

SEQ ID NO: 157353 - RNA, 19 nt, Artificial Sequence
  Description of Artificial Sequence: Synthetic oligonucleotide
gugcuguuagaaaugagga

SEQ ID NO: 157354 - RNA, 19 nt, Artificial Sequence
  Description of Artificial Sequence: Synthetic oligonucleotide
aaguuucggauggggcuga

SEQ ID NO: 157355 - RNA, 19 nt, Artificial Sequence
  Description of Artificial Sequence: Synthetic oligonucleotide
auccagacagccgaccagc

SEQ ID NO: 157356 - RNA, 19 nt, Artificial Sequence
  Description of Artificial Sequence: Synthetic oligonucleotide
cugcgcuucuccuaccugg

SEQ ID NO: 157357 - RNA, 19 nt, Artificial Sequence
  Description of Artificial Sequence: Synthetic oligonucleotide
gcugugaucgaaggugcca

SEQ ID NO: 157358 - RNA, 19 nt, Artificial Sequence
  Description of Artificial Sequence: Synthetic oligonucleotide
aaauucaucaugggggacu

SEQ ID NO: 157359 - RNA, 19 nt, Artificial Sequence
  Description of Artificial Sequence: Synthetic oligonucleotide
ucuuccgugcaggaucagu

SEQ ID NO: 157360 - RNA, 19 nt, Artificial Sequence
  Description of Artificial Sequence: Synthetic oligonucleotide
uggaaggagcuuucccacg

SEQ ID NO: 157361 - RNA, 19 nt, Artificial Sequence
  Description of Artificial Sequence: Synthetic oligonucleotide
gaggaccuggagcccccac

SEQ ID NO: 157362 - RNA, 19 nt, Artificial Sequence
  Description of Artificial Sequence: Synthetic oligonucleotide
cccgagcauauccccccac

SEQ ID NO: 157363 - RNA, 19 nt, Artificial Sequence
  Description of Artificial Sequence: Synthetic oligonucleotide
ccuccccggccacccaaac

SEQ ID NO: 157364 - RNA, 19 nt, Artificial Sequence
  Description of Artificial Sequence: Synthetic oligonucleotide
cgaauccuggagccacaca

SEQ ID NO: 157365 - RNA, 19 nt, Artificial Sequence
  Description of Artificial Sequence: Synthetic oligonucleotide
aaugggaaaugcagggagu

SEQ ID NO: 157366 - RNA, 19 nt, Artificial Sequence
  Description of Artificial Sequence: Synthetic oligonucleotide
uucuucccaaaucaccagu

SEQ ID NO: 157367 - RNA, 19 nt, Artificial Sequence
  Description of Artificial Sequence: Synthetic oligonucleotide
ugggugaaggaagagaccc

SEQ ID NO: 157368 - RNA, 19 nt, Artificial Sequence
  Description of Artificial Sequence: Synthetic oligonucleotide
caggaggauaaagacugcc

SEQ ID NO: 157369 - RNA, 19 nt, Artificial Sequence
  Description of Artificial Sequence: Synthetic oligonucleotide
cccaucaaggaagaaaaag

SEQ ID NO: 157370 - RNA, 19 nt, Artificial Sequence
  Description of Artificial Sequence: Synthetic oligonucleotide
ggaagccccuuaaaugccg

SEQ ID NO: 157371 - RNA, 19 nt, Artificial Sequence
  Description of Artificial Sequence: Synthetic oligonucleotide
gcacccuacggcaucgaaa

SEQ ID NO: 157372 - RNA, 19 nt, Artificial Sequence
  Description of Artificial Sequence: Synthetic oligonucleotide
agcaugagucaagacacug

SEQ ID NO: 157373 - RNA, 19 nt, Artificial Sequence
  Description of Artificial Sequence: Synthetic oligonucleotide
gaaguuagaagucgggucg

SEQ ID NO: 157374 - RNA, 19 nt, Artificial Sequence
  Description of Artificial Sequence: Synthetic oligonucleotide
guggggggaagucuucgag

SEQ ID NO: 157375 - RNA, 19 nt, Artificial Sequence
  Description of Artificial Sequence: Synthetic oligonucleotide
ggugcccaggcugccuccc

SEQ ID NO: 157376 - RNA, 19 nt, Artificial Sequence
  Description of Artificial Sequence: Synthetic oligonucleotide
ccagccaaaggggagccgu

SEQ ID NO: 157377 - RNA, 19 nt, Artificial Sequence
  Description of Artificial Sequence: Synthetic oligonucleotide
ucacugcccgagaaggacg

SEQ ID NO: 157378 - RNA, 19 nt, Artificial Sequence
  Description of Artificial Sequence: Synthetic oligonucleotide
gaggaccaugcacugaguu

SEQ ID NO: 157379 - RNA, 19 nt, Artificial Sequence
  Description of Artificial Sequence: Synthetic oligonucleotide
uacuggaagcccuuccugg

SEQ ID NO: 157380 - RNA, 19 nt, Artificial Sequence
  Description of Artificial Sequence: Synthetic oligonucleotide
gucaacaugugcguggcua

SEQ ID NO: 157381 - RNA, 19 nt, Artificial Sequence
  Description of Artificial Sequence: Synthetic oligonucleotide
acgguccucacggccggcg

SEQ ID NO: 157382 - RNA, 19 nt, Artificial Sequence
  Description of Artificial Sequence: Synthetic oligonucleotide
gcuuaccucugcuacaggu

SEQ ID NO: 157383 - RNA, 19 nt, Artificial Sequence
  Description of Artificial Sequence: Synthetic oligonucleotide
uuccuguucaacagcaaca

SEQ ID NO: 157384 - RNA, 19 nt, Artificial Sequence
  Description of Artificial Sequence: Synthetic oligonucleotide
acauagccugacccuccuc

SEQ ID NO: 157385 - RNA, 19 nt, Artificial Sequence
  Description of Artificial Sequence: Synthetic oligonucleotide
ccacuccaccuccacccac

SEQ ID NO: 157386 - RNA, 19 nt, Artificial Sequence
  Description of Artificial Sequence: Synthetic oligonucleotide
cuguccgccucugcccgca

SEQ ID NO: 157387 - RNA, 19 nt, Artificial Sequence
  Description of Artificial Sequence: Synthetic oligonucleotide
agagcccacgcccgacuag

SEQ ID NO: 157388 - RNA, 19 nt, Artificial Sequence
  Description of Artificial Sequence: Synthetic oligonucleotide
gcaggcaugccgcgguagg

SEQ ID NO: 157389 - RNA, 19 nt, Artificial Sequence
  Description of Artificial Sequence: Synthetic oligonucleotide
guaagggccgccggaccgc

SEQ ID NO: 157390 - RNA, 19 nt, Artificial Sequence
  Description of Artificial Sequence: Synthetic oligonucleotide
cguagagagccgggccccg

SEQ ID NO: 157391 - RNA, 19 nt, Artificial Sequence
  Description of Artificial Sequence: Synthetic oligonucleotide
ggacggacguugguucugc

SEQ ID NO: 157392 - RNA, 19 nt, Artificial Sequence
  Description of Artificial Sequence: Synthetic oligonucleotide
cacuaaaacccaucuuccc

SEQ ID NO: 157393 - RNA, 19 nt, Artificial Sequence
  Description of Artificial Sequence: Synthetic oligonucleotide
ccggaugugugucucaccc

SEQ ID NO: 157394 - RNA, 19 nt, Artificial Sequence
  Description of Artificial Sequence: Synthetic oligonucleotide
ccucauccuuuuacuuuuu

SEQ ID NO: 157395 - RNA, 19 nt, Artificial Sequence
  Description of Artificial Sequence: Synthetic oligonucleotide
ugccccuuccacuuugagu

SEQ ID NO: 157396 - RNA, 19 nt, Artificial Sequence
  Description of Artificial Sequence: Synthetic oligonucleotide
uaccaaauccacaagccau

SEQ ID NO: 157397 - RNA, 19 nt, Artificial Sequence
  Description of Artificial Sequence: Synthetic oligonucleotide
uuuuuugaggagagugaaa

SEQ ID NO: 157398 - RNA, 19 nt, Artificial Sequence
  Description of Artificial Sequence: Synthetic oligonucleotide
agagaguaccaugcuggcg

SEQ ID NO: 157399 - RNA, 19 nt, Artificial Sequence
  Description of Artificial Sequence: Synthetic oligonucleotide
ggcgcagagggaaggggcc

SEQ ID NO: 157400 - RNA, 19 nt, Artificial Sequence
  Description of Artificial Sequence: Synthetic oligonucleotide
cuacacccgucuuggggcu

SEQ ID NO: 157401 - RNA, 19 nt, Artificial Sequence
  Description of Artificial Sequence: Synthetic oligonucleotide
ucgccccacccagggcucc

SEQ ID NO: 157402 - RNA, 19 nt, Artificial Sequence
  Description of Artificial Sequence: Synthetic oligonucleotide
ccuccuggagcaucccagg

SEQ ID NO: 157403 - RNA, 19 nt, Artificial Sequence
  Description of Artificial Sequence: Synthetic oligonucleotide
gcgggcggcacgccaacag

SEQ ID NO: 157404 - RNA, 19 nt, Artificial Sequence
  Description of Artificial Sequence: Synthetic oligonucleotide
gccccccccuugaaucugc

SEQ ID NO: 157405 - RNA, 19 nt, Artificial Sequence
  Description of Artificial Sequence: Synthetic oligonucleotide
cagggagcaacucuccacu

SEQ ID NO: 157406 - RNA, 19 nt, Artificial Sequence
  Description of Artificial Sequence: Synthetic oligonucleotide
uccauauuuauuuaaacaa

SEQ ID NO: 157407 - RNA, 19 nt, Artificial Sequence
  Description of Artificial Sequence: Synthetic oligonucleotide
auuuuuuccccaaaggcau

SEQ ID NO: 157408 - RNA, 19 nt, Artificial Sequence
  Description of Artificial Sequence: Synthetic oligonucleotide
uccauagugcacuagcauu

SEQ ID NO: 157409 - RNA, 19 nt, Artificial Sequence
  Description of Artificial Sequence: Synthetic oligonucleotide
uuucuugaaccaauaaugu

SEQ ID NO: 157410 - RNA, 19 nt, Artificial Sequence
  Description of Artificial Sequence: Synthetic oligonucleotide
uauuaaaauuuuuugaugu

SEQ ID NO: 157411 - RNA, 19 nt, Artificial Sequence
  Description of Artificial Sequence: Synthetic oligonucleotide
ucagccuugcaucaagggc

SEQ ID NO: 157412 - RNA, 19 nt, Artificial Sequence
  Description of Artificial Sequence: Synthetic oligonucleotide
cuuuaucaaaaaguacaau

SEQ ID NO: 157413 - RNA, 19 nt, Artificial Sequence
  Description of Artificial Sequence: Synthetic oligonucleotide
uaauaaauccucagguagu

SEQ ID NO: 157414 - RNA, 19 nt, Artificial Sequence
  Description of Artificial Sequence: Synthetic oligonucleotide
uacugggaauggaaggcuu

SEQ ID NO: 157415 - RNA, 19 nt, Artificial Sequence
  Description of Artificial Sequence: Synthetic oligonucleotide
uugccaugggccugcugcg

SEQ ID NO: 157416 - RNA, 19 nt, Artificial Sequence
  Description of Artificial Sequence: Synthetic oligonucleotide
gucagaccaguacugggaa

SEQ ID NO: 157417 - RNA, 19 nt, Artificial Sequence
  Description of Artificial Sequence: Synthetic oligonucleotide
aggaggacgguuguaagca

SEQ ID NO: 157418 - RNA, 19 nt, Artificial Sequence
  Description of Artificial Sequence: Synthetic oligonucleotide
aguuguuauuuagugauau

SEQ ID NO: 157419 - RNA, 19 nt, Artificial Sequence
  Description of Artificial Sequence: Synthetic oligonucleotide
uuguggguaacgugagaag

SEQ ID NO: 157420 - RNA, 19 nt, Artificial Sequence
  Description of Artificial Sequence: Synthetic oligonucleotide
gauagaacaaugcuauaau

SEQ ID NO: 157421 - RNA, 19 nt, Artificial Sequence
  Description of Artificial Sequence: Synthetic oligonucleotide
uauauaaugaacacguggg

SEQ ID NO: 157422 - RNA, 19 nt, Artificial Sequence
  Description of Artificial Sequence: Synthetic oligonucleotide
guauuuaauaagaaacaug

SEQ ID NO: 157423 - RNA, 19 nt, Artificial Sequence
  Description of Artificial Sequence: Synthetic oligonucleotide
gaugugagauuacuuuguc

SEQ ID NO: 157424 - RNA, 19 nt, Artificial Sequence
  Description of Artificial Sequence: Synthetic oligonucleotide
cccgcuuauucuccucccu

SEQ ID NO: 157425 - RNA, 19 nt, Artificial Sequence
  Description of Artificial Sequence: Synthetic oligonucleotide
uguuaucugcuagaucuag

SEQ ID NO: 157426 - RNA, 19 nt, Artificial Sequence
  Description of Artificial Sequence: Synthetic oligonucleotide
guucucaaucacugcuccc

SEQ ID NO: 157427 - RNA, 19 nt, Artificial Sequence
  Description of Artificial Sequence: Synthetic oligonucleotide
cccguguguauuagaaugc

SEQ ID NO: 157428 - RNA, 19 nt, Artificial Sequence
  Description of Artificial Sequence: Synthetic oligonucleotide
cauguaaggucuucuugug

SEQ ID NO: 157429 - RNA, 19 nt, Artificial Sequence
  Description of Artificial Sequence: Synthetic oligonucleotide
guccugaugaaaaauaugu

SEQ ID NO: 157430 - RNA, 19 nt, Artificial Sequence
  Description of Artificial Sequence: Synthetic oligonucleotide
ugcuugaaaugagaaacuu

SEQ ID NO: 157431 - RNA, 19 nt, Artificial Sequence
  Description of Artificial Sequence: Synthetic oligonucleotide
uugaucucugcuuacuaau

SEQ ID NO: 157432 - RNA, 19 nt, Artificial Sequence
  Description of Artificial Sequence: Synthetic oligonucleotide
ugugccccauguccaaguc

SEQ ID NO: 157433 - RNA, 19 nt, Artificial Sequence
  Description of Artificial Sequence: Synthetic oligonucleotide
ccaaccugccugugcauga

SEQ ID NO: 157434 - RNA, 19 nt, Artificial Sequence
  Description of Artificial Sequence: Synthetic oligonucleotide
accugaucauuacauggcu

SEQ ID NO: 157435 - RNA, 19 nt, Artificial Sequence
  Description of Artificial Sequence: Synthetic oligonucleotide
ugugguuccuaagccuguu

SEQ ID NO: 157436 - RNA, 19 nt, Artificial Sequence
  Description of Artificial Sequence: Synthetic oligonucleotide
ugcugaagucauugucgcu

SEQ ID NO: 157437 - RNA, 19 nt, Artificial Sequence
  Description of Artificial Sequence: Synthetic oligonucleotide
ucagcaauagggugcaguu

SEQ ID NO: 157438 - RNA, 19 nt, Artificial Sequence
  Description of Artificial Sequence: Synthetic oligonucleotide
uuuccaggaauaggcauuu

SEQ ID NO: 157439 - RNA, 19 nt, Artificial Sequence
  Description of Artificial Sequence: Synthetic oligonucleotide
ugccuaauuccuggcauga

SEQ ID NO: 157440 - RNA, 19 nt, Artificial Sequence
  Description of Artificial Sequence: Synthetic oligonucleotide
acacucuagugacuuccug

SEQ ID NO: 157441 - RNA, 19 nt, Artificial Sequence
  Description of Artificial Sequence: Synthetic oligonucleotide
ggugaggcccagccugucc

SEQ ID NO: 157442 - RNA, 19 nt, Artificial Sequence
  Description of Artificial Sequence: Synthetic oligonucleotide
cugguacagcagggucuug

SEQ ID NO: 157443 - RNA, 19 nt, Artificial Sequence
  Description of Artificial Sequence: Synthetic oligonucleotide
gcuguaacucagacauucc

SEQ ID NO: 157444 - RNA, 19 nt, Artificial Sequence
  Description of Artificial Sequence: Synthetic oligonucleotide
caaggguaugggaagccau

SEQ ID NO: 157445 - RNA, 19 nt, Artificial Sequence
  Description of Artificial Sequence: Synthetic oligonucleotide
uauucacaccucacgcucu

SEQ ID NO: 157446 - RNA, 19 nt, Artificial Sequence
  Description of Artificial Sequence: Synthetic oligonucleotide
uggacaugauuuagggaag

SEQ ID NO: 157447 - RNA, 19 nt, Artificial Sequence
  Description of Artificial Sequence: Synthetic oligonucleotide
gcagggacaccccccgccc

SEQ ID NO: 157448 - RNA, 19 nt, Artificial Sequence
  Description of Artificial Sequence: Synthetic oligonucleotide
ccccaccuuugggaucagc

SEQ ID NO: 157449 - RNA, 19 nt, Artificial Sequence
  Description of Artificial Sequence: Synthetic oligonucleotide
ccuccgccauuccaaguca

SEQ ID NO: 157450 - RNA, 19 nt, Artificial Sequence
  Description of Artificial Sequence: Synthetic oligonucleotide
aacacucuucuugagcaga

SEQ ID NO: 157451 - RNA, 19 nt, Artificial Sequence
  Description of Artificial Sequence: Synthetic oligonucleotide
accgugauuuggaagagag

SEQ ID NO: 157452 - RNA, 19 nt, Artificial Sequence
  Description of Artificial Sequence: Synthetic oligonucleotide
ggcaccugcuggaaaccac

SEQ ID NO: 157453 - RNA, 19 nt, Artificial Sequence
  Description of Artificial Sequence: Synthetic oligonucleotide
cacuucuugaaacagccug

SEQ ID NO: 157454 - RNA, 19 nt, Artificial Sequence
  Description of Artificial Sequence: Synthetic oligonucleotide
gggugacgguccuuuaggc

SEQ ID NO: 157455 - RNA, 19 nt, Artificial Sequence
  Description of Artificial Sequence: Synthetic oligonucleotide
cagccugccgccgucucug

SEQ ID NO: 157456 - RNA, 19 nt, Artificial Sequence
  Description of Artificial Sequence: Synthetic oligonucleotide
gucccgguucaccuugccg

SEQ ID NO: 157457 - RNA, 19 nt, Artificial Sequence
  Description of Artificial Sequence: Synthetic oligonucleotide
gagagaggcgcgucugccc

SEQ ID NO: 157458 - RNA, 19 nt, Artificial Sequence
  Description of Artificial Sequence: Synthetic oligonucleotide
ccacccucaaacccugugg

SEQ ID NO: 157459 - RNA, 19 nt, Artificial Sequence
  Description of Artificial Sequence: Synthetic oligonucleotide
gggccugauggugcucacg

SEQ ID NO: 157460 - RNA, 19 nt, Artificial Sequence
  Description of Artificial Sequence: Synthetic oligonucleotide
gacucuuccugcaaaggga

SEQ ID NO: 157461 - RNA, 19 nt, Artificial Sequence
  Description of Artificial Sequence: Synthetic oligonucleotide
aacugaagaccuccacauu

SEQ ID NO: 157462 - RNA, 19 nt, Artificial Sequence
  Description of Artificial Sequence: Synthetic oligonucleotide
uaaguggcuuuuuaacaug

SEQ ID NO: 157463 - RNA, 19 nt, Artificial Sequence
  Description of Artificial Sequence: Synthetic oligonucleotide
gaaaaacacggcagcugua

SEQ ID NO: 157464 - RNA, 19 nt, Artificial Sequence
  Description of Artificial Sequence: Synthetic oligonucleotide
agcucccgagcuacucucu

SEQ ID NO: 157465 - RNA, 19 nt, Artificial Sequence
  Description of Artificial Sequence: Synthetic oligonucleotide
uugccagcauuuucacauu

SEQ ID NO: 157466 - RNA, 19 nt, Artificial Sequence
  Description of Artificial Sequence: Synthetic oligonucleotide
uuugccuuucucgugguag

SEQ ID NO: 157467 - RNA, 19 nt, Artificial Sequence
  Description of Artificial Sequence: Synthetic oligonucleotide
gaagccaguacagagaaau

SEQ ID NO: 157468 - RNA, 19 nt, Artificial Sequence
  Description of Artificial Sequence: Synthetic oligonucleotide
uucuguggugggaacauuc

SEQ ID NO: 157469 - RNA, 19 nt, Artificial Sequence
  Description of Artificial Sequence: Synthetic oligonucleotide
cgaggugucacccugcaga

SEQ ID NO: 157470 - RNA, 19 nt, Artificial Sequence
  Description of Artificial Sequence: Synthetic oligonucleotide
agcuauggugaggugugga

SEQ ID NO: 157471 - RNA, 19 nt, Artificial Sequence
  Description of Artificial Sequence: Synthetic oligonucleotide
auaaggcuuaggugccagg

SEQ ID NO: 157472 - RNA, 19 nt, Artificial Sequence
  Description of Artificial Sequence: Synthetic oligonucleotide
gcuguaagcauucugagcu

SEQ ID NO: 157473 - RNA, 19 nt, Artificial Sequence
  Description of Artificial Sequence: Synthetic oligonucleotide
ugggcuuguuguuuuuaag

SEQ ID NO: 157474 - RNA, 19 nt, Artificial Sequence
  Description of Artificial Sequence: Synthetic oligonucleotide
guccuguauauguauguag

SEQ ID NO: 157475 - RNA, 19 nt, Artificial Sequence
  Description of Artificial Sequence: Synthetic oligonucleotide
guaguuuggguguguauau

SEQ ID NO: 157476 - RNA, 19 nt, Artificial Sequence
  Description of Artificial Sequence: Synthetic oligonucleotide
uauaguagcauuucaaaau

SEQ ID NO: 157477 - RNA, 19 nt, Artificial Sequence
  Description of Artificial Sequence: Synthetic oligonucleotide
uggacguacugguuuaacc

SEQ ID NO: 157478 - RNA, 19 nt, Artificial Sequence
  Description of Artificial Sequence: Synthetic oligonucleotide
cuccuauccuuggagagca

SEQ ID NO: 157479 - RNA, 19 nt, Artificial Sequence
  Description of Artificial Sequence: Synthetic oligonucleotide
agcuggcucuccaccuugu

SEQ ID NO: 157480 - RNA, 19 nt, Artificial Sequence
  Description of Artificial Sequence: Synthetic oligonucleotide
uuacacauuauguuagaga

SEQ ID NO: 157481 - RNA, 19 nt, Artificial Sequence
  Description of Artificial Sequence: Synthetic oligonucleotide
agguagcgagcugcucugc

SEQ ID NO: 157482 - RNA, 19 nt, Artificial Sequence
  Description of Artificial Sequence: Synthetic oligonucleotide
cuauaugccuuaagccaau

SEQ ID NO: 157483 - RNA, 19 nt, Artificial Sequence
  Description of Artificial Sequence: Synthetic oligonucleotide
uauuuacucaucaggucau

SEQ ID NO: 157484 - RNA, 19 nt, Artificial Sequence
  Description of Artificial Sequence: Synthetic oligonucleotide
uuauuuuuuacaauggcca

SEQ ID NO: 157485 - RNA, 19 nt, Artificial Sequence
  Description of Artificial Sequence: Synthetic oligonucleotide
auggaauaaaccauuuuua

SEQ ID NO: 157486 - RNA, 19 nt, Artificial Sequence
  Description of Artificial Sequence: Synthetic oligonucleotide
auaaaccauuuuuacaaaa

SEQ ID NO: 157487 - RNA, 25 nt, Artificial Sequence
  Description of Artificial Sequence: Synthetic oligonucleotide
gugaugcguaguuccggcugccggu

SEQ ID NO: 157488 - RNA, 25 nt, Artificial Sequence
  Description of Artificial Sequence: Synthetic oligonucleotide
uugacaugaagaagcagcagcggcu

SEQ ID NO: 157489 - RNA, 25 nt, Artificial Sequence
  Description of Artificial Sequence: Synthetic oligonucleotide
uagggcggcgguagcugcagggguc

SEQ ID NO: 157490 - RNA, 25 nt, Artificial Sequence
  Description of Artificial Sequence: Synthetic oligonucleotide
cggggauugcagcgggccucggggc

SEQ ID NO: 157491 - RNA, 25 nt, Artificial Sequence
  Description of Artificial Sequence: Synthetic oligonucleotide
cuaagagcgcgacgcggccuagagc

SEQ ID NO: 157492 - RNA, 25 nt, Artificial Sequence
  Description of Artificial Sequence: Synthetic oligonucleotide
cggcagacggcgcagugggccgaga

SEQ ID NO: 157493 - RNA, 25 nt, Artificial Sequence
  Description of Artificial Sequence: Synthetic oligonucleotide
aaggaggcgcagcagccgcccuggc

SEQ ID NO: 157494 - RNA, 25 nt, Artificial Sequence
  Description of Artificial Sequence: Synthetic oligonucleotide
cccgucauggagauggaaaaggagu

SEQ ID NO: 157495 - RNA, 25 nt, Artificial Sequence
  Description of Artificial Sequence: Synthetic oligonucleotide
uucgagcagaucgacaaguccggga

SEQ ID NO: 157496 - RNA, 25 nt, Artificial Sequence
  Description of Artificial Sequence: Synthetic oligonucleotide
agcugggcggccauuuaccaggaua

SEQ ID NO: 157497 - RNA, 25 nt, Artificial Sequence
  Description of Artificial Sequence: Synthetic oligonucleotide
auccgacaugaagccagugacuucc

SEQ ID NO: 157498 - RNA, 25 nt, Artificial Sequence
  Description of Artificial Sequence: Synthetic oligonucleotide
ccauguagaguggccaagcuuccua

SEQ ID NO: 157499 - RNA, 25 nt, Artificial Sequence
  Description of Artificial Sequence: Synthetic oligonucleotide
aagaacaaaaaccgaaauagguaca

SEQ ID NO: 157500 - RNA, 25 nt, Artificial Sequence
  Description of Artificial Sequence: Synthetic oligonucleotide
agagacgucagucccuuugaccaua

SEQ ID NO: 157501 - RNA, 25 nt, Artificial Sequence
  Description of Artificial Sequence: Synthetic oligonucleotide
agucggauuaaacuacaucaagaag

SEQ ID NO: 157502 - RNA, 25 nt, Artificial Sequence
  Description of Artificial Sequence: Synthetic oligonucleotide
gauaaugacuauaucaacgcuaguu

SEQ ID NO: 157503 - RNA, 25 nt, Artificial Sequence
  Description of Artificial Sequence: Synthetic oligonucleotide
uugauaaaaauggaagaagcccaaa

SEQ ID NO: 157504 - RNA, 25 nt, Artificial Sequence
  Description of Artificial Sequence: Synthetic oligonucleotide
aggaguuacauucuuacccagggcc

SEQ ID NO: 157505 - RNA, 25 nt, Artificial Sequence
  Description of Artificial Sequence: Synthetic oligonucleotide
ccuuugccuaacacaugcggucacu

SEQ ID NO: 157506 - RNA, 25 nt, Artificial Sequence
  Description of Artificial Sequence: Synthetic oligonucleotide
uuuugggagauggugugggagcaga

SEQ ID NO: 157507 - RNA, 25 nt, Artificial Sequence
  Description of Artificial Sequence: Synthetic oligonucleotide
aaaagcaggggugucgucaugcuca

SEQ ID NO: 157508 - RNA, 25 nt, Artificial Sequence
  Description of Artificial Sequence: Synthetic oligonucleotide
aacagagugauggagaaagguucgu

SEQ ID NO: 157509 - RNA, 25 nt, Artificial Sequence
  Description of Artificial Sequence: Synthetic oligonucleotide
uuaaaaugcgcacaauacuggccac

SEQ ID NO: 157510 - RNA, 25 nt, Artificial Sequence
  Description of Artificial Sequence: Synthetic oligonucleotide
caaaaagaagaaaaagagaugaucu

SEQ ID NO: 157511 - RNA, 25 nt, Artificial Sequence
  Description of Artificial Sequence: Synthetic oligonucleotide
uuugaagacacaaauuugaaauuaa

SEQ ID NO: 157512 - RNA, 25 nt, Artificial Sequence
  Description of Artificial Sequence: Synthetic oligonucleotide
acauugaucucugaagauaucaagu

SEQ ID NO: 157513 - RNA, 25 nt, Artificial Sequence
  Description of Artificial Sequence: Synthetic oligonucleotide
ucauauuauacagugcgacagcuag

SEQ ID NO: 157514 - RNA, 25 nt, Artificial Sequence
  Description of Artificial Sequence: Synthetic oligonucleotide
gaauuggaaaaccuuacaacccaag

SEQ ID NO: 157515 - RNA, 25 nt, Artificial Sequence
  Description of Artificial Sequence: Synthetic oligonucleotide
gaaacucgagagaucuuacauuucc

SEQ ID NO: 157516 - RNA, 25 nt, Artificial Sequence
  Description of Artificial Sequence: Synthetic oligonucleotide
cacuauaccacauggccugacuuug

SEQ ID NO: 157517 - RNA, 25 nt, Artificial Sequence
  Description of Artificial Sequence: Synthetic oligonucleotide
ggagucccugaaucaccagccucau

SEQ ID NO: 157518 - RNA, 25 nt, Artificial Sequence
  Description of Artificial Sequence: Synthetic oligonucleotide
uucuugaacuuucuuuucaaagucc

SEQ ID NO: 157519 - RNA, 25 nt, Artificial Sequence
  Description of Artificial Sequence: Synthetic oligonucleotide
cgagagucagggucacucagcccgg

SEQ ID NO: 157520 - RNA, 25 nt, Artificial Sequence
  Description of Artificial Sequence: Synthetic oligonucleotide
gagcacgggcccguuguggugcacu

SEQ ID NO: 157521 - RNA, 25 nt, Artificial Sequence
  Description of Artificial Sequence: Synthetic oligonucleotide
ugcagugcaggcaucggcaggucug

SEQ ID NO: 157522 - RNA, 25 nt, Artificial Sequence
  Description of Artificial Sequence: Synthetic oligonucleotide
ggaaccuucugucuggcugauaccu

SEQ ID NO: 157523 - RNA, 25 nt, Artificial Sequence
  Description of Artificial Sequence: Synthetic oligonucleotide
ugccucuugcugauggacaagagga

SEQ ID NO: 157524 - RNA, 25 nt, Artificial Sequence
  Description of Artificial Sequence: Synthetic oligonucleotide
aaagacccuucuuccguugauauca

SEQ ID NO: 157525 - RNA, 25 nt, Artificial Sequence
  Description of Artificial Sequence: Synthetic oligonucleotide
aagaaagugcuguuagaaaugagga

SEQ ID NO: 157526 - RNA, 25 nt, Artificial Sequence
  Description of Artificial Sequence: Synthetic oligonucleotide
aaguuucggauggggcugauccaga

SEQ ID NO: 157527 - RNA, 25 nt, Artificial Sequence
  Description of Artificial Sequence: Synthetic oligonucleotide
acagccgaccagcugcgcuucuccu

SEQ ID NO: 157528 - RNA, 25 nt, Artificial Sequence
  Description of Artificial Sequence: Synthetic oligonucleotide
uaccuggcugugaucgaaggugcca

SEQ ID NO: 157529 - RNA, 25 nt, Artificial Sequence
  Description of Artificial Sequence: Synthetic oligonucleotide
aaauucaucaugggggacucuuccg

SEQ ID NO: 157530 - RNA, 25 nt, Artificial Sequence
  Description of Artificial Sequence: Synthetic oligonucleotide
gugcaggaucaguggaaggagcuuu

SEQ ID NO: 157531 - RNA, 25 nt, Artificial Sequence
  Description of Artificial Sequence: Synthetic oligonucleotide
ucccacgaggaccuggagcccccac

SEQ ID NO: 157532 - RNA, 25 nt, Artificial Sequence
  Description of Artificial Sequence: Synthetic oligonucleotide
cccgagcauauccccccaccucccc

SEQ ID NO: 157533 - RNA, 25 nt, Artificial Sequence
  Description of Artificial Sequence: Synthetic oligonucleotide
cggccacccaaacgaauccuggagc

SEQ ID NO: 157534 - RNA, 25 nt, Artificial Sequence
  Description of Artificial Sequence: Synthetic oligonucleotide
ccacacaaugggaaaugcagggagu

SEQ ID NO: 157535 - RNA, 25 nt, Artificial Sequence
  Description of Artificial Sequence: Synthetic oligonucleotide
uucuucccaaaucaccaguggguga

SEQ ID NO: 157536 - RNA, 25 nt, Artificial Sequence
  Description of Artificial Sequence: Synthetic oligonucleotide
aaggaagagacccaggaggauaaag

SEQ ID NO: 157537 - RNA, 25 nt, Artificial Sequence
  Description of Artificial Sequence: Synthetic oligonucleotide
gacugccccaucaaggaagaaaaag

SEQ ID NO: 157538 - RNA, 25 nt, Artificial Sequence
  Description of Artificial Sequence: Synthetic oligonucleotide
ggaagccccuuaaaugccgcacccu

SEQ ID NO: 157539 - RNA, 25 nt, Artificial Sequence
  Description of Artificial Sequence: Synthetic oligonucleotide
uacggcaucgaaagcaugagucaag

SEQ ID NO: 157540 - RNA, 25 nt, Artificial Sequence
  Description of Artificial Sequence: Synthetic oligonucleotide
gacacugaaguuagaagucgggucg

SEQ ID NO: 157541 - RNA, 25 nt, Artificial Sequence
  Description of Artificial Sequence: Synthetic oligonucleotide
guggggggaagucuucgaggugccc

SEQ ID NO: 157542 - RNA, 25 nt, Artificial Sequence
  Description of Artificial Sequence: Synthetic oligonucleotide
caggcugccuccccagccaaagggg

SEQ ID NO: 157543 - RNA, 25 nt, Artificial Sequence
  Description of Artificial Sequence: Synthetic oligonucleotide
gagccgucacugcccgagaaggacg

SEQ ID NO: 157544 - RNA, 25 nt, Artificial Sequence
  Description of Artificial Sequence: Synthetic oligonucleotide
gaggaccaugcacugaguuacugga

SEQ ID NO: 157545 - RNA, 25 nt, Artificial Sequence
  Description of Artificial Sequence: Synthetic oligonucleotide
aagcccuuccuggucaacaugugcg

SEQ ID NO: 157546 - RNA, 25 nt, Artificial Sequence
  Description of Artificial Sequence: Synthetic oligonucleotide
guggcuacgguccucacggccggcg

SEQ ID NO: 157547 - RNA, 25 nt, Artificial Sequence
  Description of Artificial Sequence: Synthetic oligonucleotide
gcuuaccucugcuacagguuccugu

SEQ ID NO: 157548 - RNA, 25 nt, Artificial Sequence
  Description of Artificial Sequence: Synthetic oligonucleotide
uucaacagcaacacauagccugacc

SEQ ID NO: 157549 - RNA, 25 nt, Artificial Sequence
  Description of Artificial Sequence: Synthetic oligonucleotide
ccuccuccacuccaccuccacccac

SEQ ID NO: 157550 - RNA, 25 nt, Artificial Sequence
  Description of Artificial Sequence: Synthetic oligonucleotide
cuguccgccucugcccgcagagccc

SEQ ID NO: 157551 - RNA, 25 nt, Artificial Sequence
  Description of Artificial Sequence: Synthetic oligonucleotide
cacgcccgacuagcaggcaugccgc

SEQ ID NO: 157552 - RNA, 25 nt, Artificial Sequence
  Description of Artificial Sequence: Synthetic oligonucleotide
cgguagguaagggccgccggaccgc

SEQ ID NO: 157553 - RNA, 25 nt, Artificial Sequence
  Description of Artificial Sequence: Synthetic oligonucleotide
cguagagagccgggccccggacgga

SEQ ID NO: 157554 - RNA, 25 nt, Artificial Sequence
  Description of Artificial Sequence: Synthetic oligonucleotide
acguugguucugcacuaaaacccau

SEQ ID NO: 157555 - RNA, 25 nt, Artificial Sequence
  Description of Artificial Sequence: Synthetic oligonucleotide
ucuuccccggaugugugucucaccc

SEQ ID NO: 157556 - RNA, 25 nt, Artificial Sequence
  Description of Artificial Sequence: Synthetic oligonucleotide
ccucauccuuuuacuuuuugccccu

SEQ ID NO: 157557 - RNA, 25 nt, Artificial Sequence
  Description of Artificial Sequence: Synthetic oligonucleotide
uuccacuuugaguaccaaauccaca

SEQ ID NO: 157558 - RNA, 25 nt, Artificial Sequence
  Description of Artificial Sequence: Synthetic oligonucleotide
aagccauuuuuugaggagagugaaa

SEQ ID NO: 157559 - RNA, 25 nt, Artificial Sequence
  Description of Artificial Sequence: Synthetic oligonucleotide
agagaguaccaugcuggcggcgcag

SEQ ID NO: 157560 - RNA, 25 nt, Artificial Sequence
  Description of Artificial Sequence: Synthetic oligonucleotide
gagggaaggggccuacacccgucuu

SEQ ID NO: 157561 - RNA, 25 nt, Artificial Sequence
  Description of Artificial Sequence: Synthetic oligonucleotide
uggggcucgccccacccagggcucc

SEQ ID NO: 157562 - RNA, 25 nt, Artificial Sequence
  Description of Artificial Sequence: Synthetic oligonucleotide
ccuccuggagcaucccaggcgggcg

SEQ ID NO: 157563 - RNA, 25 nt, Artificial Sequence
  Description of Artificial Sequence: Synthetic oligonucleotide
ggcacgccaacagccccccccuuga

SEQ ID NO: 157564 - RNA, 25 nt, Artificial Sequence
  Description of Artificial Sequence: Synthetic oligonucleotide
aaucugcagggagcaacucuccacu

SEQ ID NO: 157565 - RNA, 25 nt, Artificial Sequence
  Description of Artificial Sequence: Synthetic oligonucleotide
uccauauuuauuuaaacaauuuuuu

SEQ ID NO: 157566 - RNA, 25 nt, Artificial Sequence
  Description of Artificial Sequence: Synthetic oligonucleotide
uccccaaaggcauccauagugcacu

SEQ ID NO: 157567 - RNA, 25 nt, Artificial Sequence
  Description of Artificial Sequence: Synthetic oligonucleotide
uagcauuuucuugaaccaauaaugu

SEQ ID NO: 157568 - RNA, 25 nt, Artificial Sequence
  Description of Artificial Sequence: Synthetic oligonucleotide
uauuaaaauuuuuugaugucagccu

SEQ ID NO: 157569 - RNA, 25 nt, Artificial Sequence
  Description of Artificial Sequence: Synthetic oligonucleotide
uugcaucaagggcuuuaucaaaaag

SEQ ID NO: 157570 - RNA, 25 nt, Artificial Sequence
  Description of Artificial Sequence: Synthetic oligonucleotide
guacaauaauaaauccucagguagu

SEQ ID NO: 157571 - RNA, 25 nt, Artificial Sequence
  Description of Artificial Sequence: Synthetic oligonucleotide
uacugggaauggaaggcuuugccau

SEQ ID NO: 157572 - RNA, 25 nt, Artificial Sequence
  Description of Artificial Sequence: Synthetic oligonucleotide
ugggccugcugcgucagaccaguac

SEQ ID NO: 157573 - RNA, 25 nt, Artificial Sequence
  Description of Artificial Sequence: Synthetic oligonucleotide
cugggaaggaggacgguuguaagca

SEQ ID NO: 157574 - RNA, 25 nt, Artificial Sequence
  Description of Artificial Sequence: Synthetic oligonucleotide
aguuguuauuuagugauauuguggg

SEQ ID NO: 157575 - RNA, 25 nt, Artificial Sequence
  Description of Artificial Sequence: Synthetic oligonucleotide
guaacgugagaagauagaacaaugc

SEQ ID NO: 157576 - RNA, 25 nt, Artificial Sequence
  Description of Artificial Sequence: Synthetic oligonucleotide
cuauaauauauaaugaacacguggg

SEQ ID NO: 157577 - RNA, 25 nt, Artificial Sequence
  Description of Artificial Sequence: Synthetic oligonucleotide
guauuuaauaagaaacaugauguga

SEQ ID NO: 157578 - RNA, 25 nt, Artificial Sequence
  Description of Artificial Sequence: Synthetic oligonucleotide
agauuacuuugucccgcuuauucuc

SEQ ID NO: 157579 - RNA, 25 nt, Artificial Sequence
  Description of Artificial Sequence: Synthetic oligonucleotide
ccucccuguuaucugcuagaucuag

SEQ ID NO: 157580 - RNA, 25 nt, Artificial Sequence
  Description of Artificial Sequence: Synthetic oligonucleotide
guucucaaucacugcucccccgugu

SEQ ID NO: 157581 - RNA, 25 nt, Artificial Sequence
  Description of Artificial Sequence: Synthetic oligonucleotide
uguauuagaaugcauguaaggucuu

SEQ ID NO: 157582 - RNA, 25 nt, Artificial Sequence
  Description of Artificial Sequence: Synthetic oligonucleotide
ucuuguguccugaugaaaaauaugu

SEQ ID NO: 157583 - RNA, 25 nt, Artificial Sequence
  Description of Artificial Sequence: Synthetic oligonucleotide
ugcuugaaaugagaaacuuugaucu

SEQ ID NO: 157584 - RNA, 25 nt, Artificial Sequence
  Description of Artificial Sequence: Synthetic oligonucleotide
ucugcuuacuaaugugccccauguc

SEQ ID NO: 157585 - RNA, 25 nt, Artificial Sequence
  Description of Artificial Sequence: Synthetic oligonucleotide
ccaaguccaaccugccugugcauga

SEQ ID NO: 157586 - RNA, 25 nt, Artificial Sequence
  Description of Artificial Sequence: Synthetic oligonucleotide
accugaucauuacauggcugugguu

SEQ ID NO: 157587 - RNA, 25 nt, Artificial Sequence
  Description of Artificial Sequence: Synthetic oligonucleotide
uccuaagccuguugcugaagucauu

SEQ ID NO: 157588 - RNA, 25 nt, Artificial Sequence
  Description of Artificial Sequence: Synthetic oligonucleotide
ugucgcucagcaauagggugcaguu

SEQ ID NO: 157589 - RNA, 25 nt, Artificial Sequence
  Description of Artificial Sequence: Synthetic oligonucleotide
uuuccaggaauaggcauuugccuaa

SEQ ID NO: 157590 - RNA, 25 nt, Artificial Sequence
  Description of Artificial Sequence: Synthetic oligonucleotide
auuccuggcaugacacucuagugac

SEQ ID NO: 157591 - RNA, 25 nt, Artificial Sequence
  Description of Artificial Sequence: Synthetic oligonucleotide
cuuccuggugaggcccagccugucc

SEQ ID NO: 157592 - RNA, 25 nt, Artificial Sequence
  Description of Artificial Sequence: Synthetic oligonucleotide
cugguacagcagggucuugcuguaa

SEQ ID NO: 157593 - RNA, 25 nt, Artificial Sequence
  Description of Artificial Sequence: Synthetic oligonucleotide
acucagacauuccaaggguauggga

SEQ ID NO: 157594 - RNA, 25 nt, Artificial Sequence
  Description of Artificial Sequence: Synthetic oligonucleotide
aagccauauucacaccucacgcucu

SEQ ID NO: 157595 - RNA, 25 nt, Artificial Sequence
  Description of Artificial Sequence: Synthetic oligonucleotide
uggacaugauuuagggaagcaggga

SEQ ID NO: 157596 - RNA, 25 nt, Artificial Sequence
  Description of Artificial Sequence: Synthetic oligonucleotide
acaccccccgccccccaccuuuggg

SEQ ID NO: 157597 - RNA, 25 nt, Artificial Sequence
  Description of Artificial Sequence: Synthetic oligonucleotide
gaucagccuccgccauuccaaguca

SEQ ID NO: 157598 - RNA, 25 nt, Artificial Sequence
  Description of Artificial Sequence: Synthetic oligonucleotide
aacacucuucuugagcagaccguga

SEQ ID NO: 157599 - RNA, 25 nt, Artificial Sequence
  Description of Artificial Sequence: Synthetic oligonucleotide
auuuggaagagaggcaccugcugga

SEQ ID NO: 157600 - RNA, 25 nt, Artificial Sequence
  Description of Artificial Sequence: Synthetic oligonucleotide
aaaccacacuucuugaaacagccug

SEQ ID NO: 157601 - RNA, 25 nt, Artificial Sequence
  Description of Artificial Sequence: Synthetic oligonucleotide
gggugacgguccuuuaggcagccug

SEQ ID NO: 157602 - RNA, 25 nt, Artificial Sequence
  Description of Artificial Sequence: Synthetic oligonucleotide
gccgccgucucugucccgguucacc

SEQ ID NO: 157603 - RNA, 25 nt, Artificial Sequence
  Description of Artificial Sequence: Synthetic oligonucleotide
cuugccgagagaggcgcgucugccc

SEQ ID NO: 157604 - RNA, 25 nt, Artificial Sequence
  Description of Artificial Sequence: Synthetic oligonucleotide
ccacccucaaacccuguggggccug

SEQ ID NO: 157605 - RNA, 25 nt, Artificial Sequence
  Description of Artificial Sequence: Synthetic oligonucleotide
gauggugcucacgacucuuccugca

SEQ ID NO: 157606 - RNA, 25 nt, Artificial Sequence
  Description of Artificial Sequence: Synthetic oligonucleotide
aaagggaacugaagaccuccacauu

SEQ ID NO: 157607 - RNA, 25 nt, Artificial Sequence
  Description of Artificial Sequence: Synthetic oligonucleotide
uaaguggcuuuuuaacaugaaaaac

SEQ ID NO: 157608 - RNA, 25 nt, Artificial Sequence
  Description of Artificial Sequence: Synthetic oligonucleotide
cacggcagcuguagcucccgagcua

SEQ ID NO: 157609 - RNA, 25 nt, Artificial Sequence
  Description of Artificial Sequence: Synthetic oligonucleotide
acucucuugccagcauuuucacauu

SEQ ID NO: 157610 - RNA, 25 nt, Artificial Sequence
  Description of Artificial Sequence: Synthetic oligonucleotide
uuugccuuucucgugguagaagcca

SEQ ID NO: 157611 - RNA, 25 nt, Artificial Sequence
  Description of Artificial Sequence: Synthetic oligonucleotide
aguacagagaaauucugugguggga

SEQ ID NO: 157612 - RNA, 25 nt, Artificial Sequence
  Description of Artificial Sequence: Synthetic oligonucleotide
aacauucgaggugucacccugcaga

SEQ ID NO: 157613 - RNA, 25 nt, Artificial Sequence
  Description of Artificial Sequence: Synthetic oligonucleotide
agcuauggugagguguggauaaggc

SEQ ID NO: 157614 - RNA, 25 nt, Artificial Sequence
  Description of Artificial Sequence: Synthetic oligonucleotide
cuuaggugccaggcuguaagcauuc

SEQ ID NO: 157615 - RNA, 25 nt, Artificial Sequence
  Description of Artificial Sequence: Synthetic oligonucleotide
cugagcugggcuuguuguuuuuaag

SEQ ID NO: 157616 - RNA, 25 nt, Artificial Sequence
  Description of Artificial Sequence: Synthetic oligonucleotide
guccuguauauguauguaguaguuu

SEQ ID NO: 157617 - RNA, 25 nt, Artificial Sequence
  Description of Artificial Sequence: Synthetic oligonucleotide
uggguguguauauauaguagcauuu

SEQ ID NO: 157618 - RNA, 25 nt, Artificial Sequence
  Description of Artificial Sequence: Synthetic oligonucleotide
ucaaaauggacguacugguuuaacc

SEQ ID NO: 157619 - RNA, 25 nt, Artificial Sequence
  Description of Artificial Sequence: Synthetic oligonucleotide
cuccuauccuuggagagcagcuggc

SEQ ID NO: 157620 - RNA, 25 nt, Artificial Sequence
  Description of Artificial Sequence: Synthetic oligonucleotide
cucuccaccuuguuacacauuaugu

SEQ ID NO: 157621 - RNA, 25 nt, Artificial Sequence
  Description of Artificial Sequence: Synthetic oligonucleotide
uuagagagguagcgagcugcucugc

SEQ ID NO: 157622 - RNA, 25 nt, Artificial Sequence
  Description of Artificial Sequence: Synthetic oligonucleotide
cuauaugccuuaagccaauauuuac

SEQ ID NO: 157623 - RNA, 25 nt, Artificial Sequence
  Description of Artificial Sequence: Synthetic oligonucleotide
cucaucaggucauuauuuuuuacaa

SEQ ID NO: 157624 - RNA, 25 nt, Artificial Sequence
  Description of Artificial Sequence: Synthetic oligonucleotide
auggccauggaauaaaccauuuuua

SEQ ID NO: 157625 - RNA, 25 nt, Artificial Sequence
  Description of Artificial Sequence: Synthetic oligonucleotide
cauggaauaaaccauuuuuacaaaa

SEQ ID NO: 157626 - DNA, 21 bp, Artificial Sequence
  Description of Artificial Sequence: Synthetic oligonucleotide
  Description of Combined DNA/RNA Molecule: Synthetic oligonucleotide
cuacacaaaucagcgauuutt

SEQ ID NO: 157627 - DNA, 21 bp, Artificial Sequence
  Description of Artificial Sequence: Synthetic oligonucleotide
  Description of Combined DNA/RNA Molecule: Synthetic oligonucleotide
aaaucgcugauuuguguagtt

SEQ ID NO: 157628 - DNA, 25 bp, Artificial Sequence
  Description of Artificial Sequence: Synthetic oligonucleotide
  Description of Combined DNA/RNA Molecule: Synthetic oligonucleotide
cuacacaaaucagcgauuuccaugt

SEQ ID NO: 157629 - RNA, 27 nt, Artificial Sequence
  Description of Artificial Sequence: Synthetic oligonucleotide
acauggaaaucgcugauuuguguaguc

SEQ ID NO: 157630 - RNA, 13 nt, Artificial Sequence
  Description of Artificial Sequence: Synthetic oligonucleotide
cuacacaaaucag

SEQ ID NO: 157631 - DNA, 11 bp, Artificial Sequence
  Description of Artificial Sequence: Synthetic oligonucleotide
  Description of Combined DNA/RNA Molecule: Synthetic oligonucleotide
gauuuccaugt

SEQ ID NO: 157632 - DNA, 21 bp, Artificial Sequence
  Description of Artificial Sequence: Synthetic oligonucleotide
  Description of Combined DNA/RNA Molecule: Synthetic oligonucleotide
ggaucuuauuucuucggagtt

SEQ ID NO: 157633 - DNA, 21 bp, Artificial Sequence
  Description of Artificial Sequence: Synthetic oligonucleotide
  Description of Combined DNA/RNA Molecule: Synthetic oligonucleotide
cuccgaagaaauaagaucctt

SEQ ID NO: 157634 - RNA, 11 nt, Artificial Sequence
  Description of Artificial Sequence: Synthetic oligonucleotide
ggaucuuauuu

SEQ ID NO: 157635 - DNA, 10 bp, Artificial Sequence
  Description of Artificial Sequence: Synthetic oligonucleotide
  Description of Combined DNA/RNA Molecule: Synthetic oligonucleotide
cuucggagtt

SEQ ID NO: 157636 - RNA, 27 nt, Artificial Sequence
  Description of Artificial Sequence: Synthetic oligonucleotide
cauugucuccgaagaaauaagauccuu

SEQ ID NO: 157637 - RNA, 8 nt, Artificial Sequence
  Description of Artificial Sequence: Synthetic oligonucleotide
  modified_base (2): LNA-G
ggaucuua

SEQ ID NO: 157638 - DNA, 17 bp, Artificial Sequence
  Description of Artificial Sequence: Synthetic oligonucleotide
  Description of Combined DNA/RNA Molecule: Synthetic oligonucleotide
uuucuucggagacaatg

SEQ ID NO: 157639 - DNA, 16 bp, Artificial Sequence
  Description of Artificial Sequence: Synthetic oligonucleotide
  Description of Combined DNA/RNA Molecule: Synthetic oligonucleotide
uucuucggagacaatg

SEQ ID NO: 157640 - DNA, 15 bp, Artificial Sequence
  Description of Artificial Sequence: Synthetic oligonucleotide
  Description of Combined DNA/RNA Molecule: Synthetic oligonucleotide
ucuucggagacaatg

SEQ ID NO: 157641 - DNA, 14 bp, Artificial Sequence
  Description of Artificial Sequence: Synthetic oligonucleotide
  Description of Combined DNA/RNA Molecule: Synthetic oligonucleotide
cuucggagacaatg

SEQ ID NO: 157642 - DNA, 13 bp, Artificial Sequence
  Description of Artificial Sequence: Synthetic oligonucleotide
  Description of Combined DNA/RNA Molecule: Synthetic oligonucleotide
uucggagacaatg

SEQ ID NO: 157643 - DNA, 12 bp, Artificial Sequence
  Description of Artificial Sequence: Synthetic oligonucleotide
  Description of Combined DNA/RNA Molecule: Synthetic oligonucleotide
ucggagacaatg

SEQ ID NO: 157644 - DNA, 11 bp, Artificial Sequence
  Description of Artificial Sequence: Synthetic oligonucleotide
  Description of Combined DNA/RNA Molecule: Synthetic oligonucleotide
cggagacaatg

SEQ ID NO: 157645 - RNA, 9 nt, Artificial Sequence
  Description of Artificial Sequence: Synthetic oligonucleotide
  modified_base (2): LNA-G
ggaucuuau

SEQ ID NO: 157646 - RNA, 10 nt, Artificial Sequence
  Description of Artificial Sequence: Synthetic oligonucleotide
  modified_base (2): LNA-G
ggaucuuauu

SEQ ID NO: 157647 - RNA, 11 nt, Artificial Sequence
  Description of Artificial Sequence: Synthetic oligonucleotide
  modified_base (2): LNA-G
ggaucuuauuu

SEQ ID NO: 157648 - RNA, 12 nt, Artificial Sequence
  Description of Artificial Sequence: Synthetic oligonucleotide
  modified_base (2): LNA-G
ggaucuuauuuc

SEQ ID NO: 157649 - RNA, 8 nt, Artificial Sequence
  Description of Artificial Sequence: Synthetic oligonucleotide
  modified_base (3): LNA-A
cuacacaa

SEQ ID NO: 157650 - DNA, 13 bp, Artificial Sequence
  Description of Artificial Sequence: Synthetic oligonucleotide
  Description of Combined DNA/RNA Molecule: Synthetic oligonucleotide
  modified_base (8): LNA-A
aucagcgauuutt

SEQ ID NO: 157651 - DNA, 12 bp, Artificial Sequence
  Description of Artificial Sequence: Synthetic oligonucleotide
  Description of Combined DNA/RNA Molecule: Synthetic oligonucleotide
  modified_base (7): LNA-A
ucagcgauuutt

SEQ ID NO: 157652 - DNA, 11 bp, Artificial Sequence
  Description of Artificial Sequence: Synthetic oligonucleotide
  Description of Combined DNA/RNA Molecule: Synthetic oligonucleotide
  modified_base (6): LNA-A
cagcgauuutt

SEQ ID NO: 157653 - DNA, 10 bp, Artificial Sequence
  Description of Artificial Sequence: Synthetic oligonucleotide
  Description of Combined DNA/RNA Molecule: Synthetic oligonucleotide
  modified_base (5): LNA-A
agcgauuutt

SEQ ID NO: 157654 - DNA, 9 bp, Artificial Sequence
  Description of Artificial Sequence: Synthetic oligonucleotide
  Description of Combined DNA/RNA Molecule: Synthetic oligonucleotide
  modified_base (4): LNA-A
gcgauuutt

SEQ ID NO: 157655 - DNA, 8 bp, Artificial Sequence
  Description of Artificial Sequence: Synthetic oligonucleotide
  Description of Combined DNA/RNA Molecule: Synthetic oligonucleotide
  modified_base (3): LNA-A
cgauuutt

SEQ ID NO: 157656 - DNA, 7 bp, Artificial Sequence
  Description of Artificial Sequence: Synthetic oligonucleotide
  Description of Combined DNA/RNA Molecule: Synthetic oligonucleotide
  modified_base (2): LNA-A
gauuutt

SEQ ID NO: 157657 - RNA, 9 nt, Artificial Sequence
  Description of Artificial Sequence: Synthetic oligonucleotide
  modified_base (3): LNA-A
cuacacaaa

SEQ ID NO: 157658 - RNA, 10 nt, Artificial Sequence
  Description of Artificial Sequence: Synthetic oligonucleotide
  modified_base (3): LNA-A
cuacacaaau

SEQ ID NO: 157659 - RNA, 11 nt, Artificial Sequence
  Description of Artificial Sequence: Synthetic oligonucleotide
  modified_base (3): LNA-A
cuacacaaauc

SEQ ID NO: 157660 - RNA, 12 nt, Artificial Sequence
  Description of Artificial Sequence: Synthetic oligonucleotide
  modified_base (3): LNA-A
cuacacaaauca

SEQ ID NO: 157661 - RNA, 13 nt, Artificial Sequence
  Description of Artificial Sequence: Synthetic oligonucleotide
  modified_base (3): LNA-A
cuacacaaaucag

SEQ ID NO: 157662 - RNA, 14 nt, Artificial Sequence
  Description of Artificial Sequence: Synthetic oligonucleotide
  modified_base (3): LNA-A
cuacacaaaucagc

SEQ ID NO: 157663 - RNA, 13 nt, Artificial Sequence
  Description of Artificial Sequence: Synthetic oligonucleotide
  modified_base (2): LNA-G
ggaucuuauuucu

SEQ ID NO: 157664 - RNA, 14 nt, Artificial Sequence
  Description of Artificial Sequence: Synthetic oligonucleotide
  modified_base (2): LNA-G
ggaucuuauuucuu

SEQ ID NO: 157665 - RNA, 8 nt, Artificial Sequence
  Description of Artificial Sequence: Synthetic oligonucleotide
  modified_base (2): LNA-G
  modified_base (8): LNA-A
ggaucuua

SEQ ID NO: 157666 - RNA, 9 nt, Artificial Sequence
  Description of Artificial Sequence: Synthetic oligonucleotide
  modified_base (2): LNA-G
  modified_base (9): LNA-U
ggaucuuau

SEQ ID NO: 157667 - RNA, 10 nt, Artificial Sequence
  Description of Artificial Sequence: Synthetic oligonucleotide
  modified_base (2): LNA-G
  modified_base (10): LNA-U
ggaucuuauu

SEQ ID NO: 157668 - RNA, 11 nt, Artificial Sequence
  Description of Artificial Sequence: Synthetic oligonucleotide
  modified_base (2): LNA-G
  modified_base (11): LNA-U
ggaucuuauuu

SEQ ID NO: 157669 - RNA, 12 nt, Artificial Sequence
  Description of Artificial Sequence: Synthetic oligonucleotide
  modified_base (2): LNA-G
  modified_base (12): LNA-C
ggaucuuauuuc

SEQ ID NO: 157670 - RNA, 13 nt, Artificial Sequence
  Description of Artificial Sequence: Synthetic oligonucleotide
  modified_base (2): LNA-G
  modified_base (13): LNA-U
ggaucuuauuucu

SEQ ID NO: 157671 - RNA, 14 nt, Artificial Sequence
  Description of Artificial Sequence: Synthetic oligonucleotide
  modified_base (2): LNA-G
  modified_base (14): LNA-U
ggaucuuauuucuu

SEQ ID NO: 157672 - DNA, 13 bp, Artificial Sequence
  Description of Artificial Sequence: Synthetic oligonucleotide
  Description of Combined DNA/RNA Molecule: Synthetic oligonucleotide
  modified_base (8): LNA-G
uuucuucggagtt

SEQ ID NO: 157673 - DNA, 12 bp, Artificial Sequence
  Description of Artificial Sequence: Synthetic oligonucleotide
  Description of Combined DNA/RNA Molecule: Synthetic oligonucleotide
  modified_base (7): LNA-G
uucuucggagtt

SEQ ID NO: 157674 - DNA, 11 bp, Artificial Sequence
  Description of Artificial Sequence: Synthetic oligonucleotide
  Description of Combined DNA/RNA Molecule: Synthetic oligonucleotide
  modified_base (6): LNA-G
ucuucggagtt

SEQ ID NO: 157675 - DNA, 10 bp, Artificial Sequence
  Description of Artificial Sequence: Synthetic oligonucleotide
  Description of Combined DNA/RNA Molecule: Synthetic oligonucleotide
  modified_base (5): LNA-G
cuucggagtt

SEQ ID NO: 157676 - DNA, 9 bp, Artificial Sequence
  Description of Artificial Sequence: Synthetic oligonucleotide
  Description of Combined DNA/RNA Molecule: Synthetic oligonucleotide
  modified_base (4): LNA-G
uucggagtt

SEQ ID NO: 157677 - DNA, 8 bp, Artificial Sequence
  Description of Artificial Sequence: Synthetic oligonucleotide
  Description of Combined DNA/RNA Molecule: Synthetic oligonucleotide
  modified_base (3): LNA-G
ucggagtt

SEQ ID NO: 157678 - DNA, 7 bp, Artificial Sequence
  Description of Artificial Sequence: Synthetic oligonucleotide
  Description of Combined DNA/RNA Molecule: Synthetic oligonucleotide
  modified_base (2): LNA-G
cggagtt

SEQ ID NO: 157679 - DNA, 13 bp, Artificial Sequence
  Description of Artificial Sequence: Synthetic oligonucleotide
  Description of Combined DNA/RNA Molecule: Synthetic oligonucleotide
  modified_base (1): LNA-U
  modified_base (8): LNA-G
uuucuucggagtt

SEQ ID NO: 157680 - DNA, 12 bp, Artificial Sequence
  Description of Artificial Sequence: Synthetic oligonucleotide
  Description of Combined DNA/RNA Molecule: Synthetic oligonucleotide
  modified_base (1): LNA-U
  modified_base (7): LNA-G
uucuucggagtt

SEQ ID NO: 157681 - DNA, 11 bp, Artificial Sequence
  Description of Artificial Sequence: Synthetic oligonucleotide
  Description of Combined DNA/RNA Molecule: Synthetic oligonucleotide
  modified_base (1): LNA-U
  modified_base (6): LNA-G
ucuucggagtt

SEQ ID NO: 157682 - DNA, 10 bp, Artificial Sequence
  Description of Artificial Sequence: Synthetic oligonucleotide
  Description of Combined DNA/RNA Molecule: Synthetic oligonucleotide
  modified_base (1): LNA-C
  modified_base (5): LNA-G
cuucggagtt

SEQ ID NO: 157683 - DNA, 9 bp, Artificial Sequence
  Description of Artificial Sequence: Synthetic oligonucleotide
  Description of Combined DNA/RNA Molecule: Synthetic oligonucleotide
  modified_base (1): LNA-U
  modified_base (4): LNA-G
uucggagtt

SEQ ID NO: 157684 - DNA, 8 bp, Artificial Sequence
  Description of Artificial Sequence: Synthetic oligonucleotide
  Description of Combined DNA/RNA Molecule: Synthetic oligonucleotide
  modified_base (1): LNA-U
  modified_base (3): LNA-G
ucggagtt

SEQ ID NO: 157685 - DNA, 7 bp, Artificial Sequence
  Description of Artificial Sequence: Synthetic oligonucleotide
  Description of Combined DNA/RNA Molecule: Synthetic oligonucleotide
  modified_base (1): LNA-C
  modified_base (2): LNA-G
cggagtt

SEQ ID NO: 157686 - DNA, 21 bp, Artificial Sequence
  Description of Artificial Sequence: Synthetic oligonucleotide
  Description of Combined DNA/RNA Molecule: Synthetic oligonucleotide
  modified_base (2): LNA-G
  modified_base (16): LNA-G
ggaucuuauuucuucggagtt

SEQ ID NO: 157687 - DNA, 25 bp, Artificial Sequence
  Description of Artificial Sequence: Synthetic oligonucleotide
  Description of Combined DNA/RNA Molecule: Synthetic oligonucleotide
ggaucuuauuucuucggagacaatg

SEQ ID NO: 157688 - RNA, 25 nt, Artificial Sequence
  Description of Artificial Sequence: Synthetic oligonucleotide
guauuuugaugaggaguucacggcc

SEQ ID NO: 157689 - RNA, 25 nt, Artificial Sequence
  Description of Artificial Sequence: Synthetic oligonucleotide
ggcccagaugaucaccaucacacca

SEQ ID NO: 157690 - RNA, 25 nt, Artificial Sequence
  Description of Artificial Sequence: Synthetic oligonucleotide
gggaagaaaacuauccugcggguuu

SEQ ID NO: 157691 - RNA, 25 nt, Artificial Sequence
  Description of Artificial Sequence: Synthetic oligonucleotide
guuuuaauuuauuucauccaguuug

SEQ ID NO: 157692 - RNA, 25 nt, Artificial Sequence
  Description of Artificial Sequence: Synthetic oligonucleotide
acguagggaaauguuaaggacuucu

SEQ ID NO: 157693 - RNA, 25 nt, Artificial Sequence
  Description of Artificial Sequence: Synthetic oligonucleotide
ccaggguuuacccagugggacagag

SEQ ID NO: 157694 - RNA, 25 nt, Artificial Sequence
  Description of Artificial Sequence: Synthetic oligonucleotide
agcaagguuuaaauuuguuauugug

SEQ ID NO: 157695 - RNA, 25 nt, Artificial Sequence
  Description of Artificial Sequence: Synthetic oligonucleotide
uguauuauguuguucaaaugcauuu

SEQ ID NO: 157696 - RNA, 25 nt, Artificial Sequence
  Description of Artificial Sequence: Synthetic oligonucleotide
uuuuaaucuuugugacaggaaagcc

SEQ ID NO: 157697 - RNA, 25 nt, Artificial Sequence
  Description of Artificial Sequence: Synthetic oligonucleotide
uuaaucuuugugacaggaaagcccu

SEQ ID NO: 157698 - RNA, 25 nt, Artificial Sequence
  Description of Artificial Sequence: Synthetic oligonucleotide
gcugcuuaugucucccagcauggcc

SEQ ID NO: 157699 - RNA, 25 nt, Artificial Sequence
  Description of Artificial Sequence: Synthetic oligonucleotide
aaguguuucagaagcuucucccuga

SEQ ID NO: 157700 - RNA, 25 nt, Artificial Sequence
  Description of Artificial Sequence: Synthetic oligonucleotide
gaccaucaauaaggaagaagcccuu

SEQ ID NO: 157701 - RNA, 25 nt, Artificial Sequence
  Description of Artificial Sequence: Synthetic oligonucleotide
ccaucaauaaggaagaagcccuuca

SEQ ID NO: 157702 - RNA, 25 nt, Artificial Sequence
  Description of Artificial Sequence: Synthetic oligonucleotide
ucaauaaggaagaagcccuucagcg

SEQ ID NO: 157703 - RNA, 25 nt, Artificial Sequence
  Description of Artificial Sequence: Synthetic oligonucleotide
aauaaggaagaagcccuucagcggc

SEQ ID NO: 157704 - RNA, 25 nt, Artificial Sequence
  Description of Artificial Sequence: Synthetic oligonucleotide
aggaagaagcccuucagcggccagu

SEQ ID NO: 157705 - RNA, 25 nt, Artificial Sequence
  Description of Artificial Sequence: Synthetic oligonucleotide
gcauaacuaaaggugaaaagcuccg

SEQ ID NO: 157706 - RNA, 25 nt, Artificial Sequence
  Description of Artificial Sequence: Synthetic oligonucleotide
cauaacuaaaggugaaaagcuccgg

SEQ ID NO: 157707 - RNA, 25 nt, Artificial Sequence
  Description of Artificial Sequence: Synthetic oligonucleotide
cuacaucacgccagucaacagucug

SEQ ID NO: 157708 - RNA, 25 nt, Artificial Sequence
  Description of Artificial Sequence: Synthetic oligonucleotide
acuggauuuaagcagaguucaaaag

SEQ ID NO: 157709 - RNA, 25 nt, Artificial Sequence
  Description of Artificial Sequence: Synthetic oligonucleotide
cuggauuuaagcagaguucaaaagc

SEQ ID NO: 157710 - RNA, 25 nt, Artificial Sequence
  Description of Artificial Sequence: Synthetic oligonucleotide
gauuuaagcagaguucaaaagcccu

SEQ ID NO: 157711 - RNA, 25 nt, Artificial Sequence
  Description of Artificial Sequence: Synthetic oligonucleotide
auuuaagcagaguucaaaagcccuu

SEQ ID NO: 157712 - RNA, 25 nt, Artificial Sequence
  Description of Artificial Sequence: Synthetic oligonucleotide
uuaagcagaguucaaaagcccuuca

SEQ ID NO: 157713 - RNA, 25 nt, Artificial Sequence
  Description of Artificial Sequence: Synthetic oligonucleotide
uaagcagaguucaaaagcccuucag

SEQ ID NO: 157714 - RNA, 25 nt, Artificial Sequence
  Description of Artificial Sequence: Synthetic oligonucleotide
agcagaguucaaaagcccuucagcg

SEQ ID NO: 157715 - RNA, 25 nt, Artificial Sequence
  Description of Artificial Sequence: Synthetic oligonucleotide
cucagggucugagugaagccgcucg

SEQ ID NO: 157716 - RNA, 25 nt, Artificial Sequence
  Description of Artificial Sequence: Synthetic oligonucleotide
caagcaacuacaucacgccagucaa

SEQ ID NO: 157717 - RNA, 25 nt, Artificial Sequence
  Description of Artificial Sequence: Synthetic oligonucleotide
aucaauggcagcuucuuggugcgug

SEQ ID NO: 157718 - RNA, 25 nt, Artificial Sequence
  Description of Artificial Sequence: Synthetic oligonucleotide
uuccagcccacauuggauucaucag

SEQ ID NO: 157719 - RNA, 25 nt, Artificial Sequence
  Description of Artificial Sequence: Synthetic oligonucleotide
cagcugagaauguggaauaccuaag

SEQ ID NO: 157720 - RNA, 25 nt, Artificial Sequence
  Description of Artificial Sequence: Synthetic oligonucleotide
aacguaucuccuaauuugaggcuca

SEQ ID NO: 157721 - RNA, 25 nt, Artificial Sequence
  Description of Artificial Sequence: Synthetic oligonucleotide
ccuaaaauaauuucucuacaauugg

SEQ ID NO: 157722 - RNA, 25 nt, Artificial Sequence
  Description of Artificial Sequence: Synthetic oligonucleotide
uggaagauucagcuaguuaggagcc

SEQ ID NO: 157723 - RNA, 25 nt, Artificial Sequence
  Description of Artificial Sequence: Synthetic oligonucleotide
uuaaacucuccuagucaauauccac

SEQ ID NO: 157724 - RNA, 25 nt, Artificial Sequence
  Description of Artificial Sequence: Synthetic oligonucleotide
cagccuacaguuauguucagucaca

SEQ ID NO: 157725 - RNA, 25 nt, Artificial Sequence
  Description of Artificial Sequence: Synthetic oligonucleotide
guuauguucagucacacacacauac

SEQ ID NO: 157726 - RNA, 25 nt, Artificial Sequence
  Description of Artificial Sequence: Synthetic oligonucleotide
cacauacaaaauguuccuuuugcuu

SEQ ID NO: 157727 - RNA, 25 nt, Artificial Sequence
  Description of Artificial Sequence: Synthetic oligonucleotide
uccuuuugcuuuuaaaguaauuuuu

SEQ ID NO: 157728 - RNA, 25 nt, Artificial Sequence
  Description of Artificial Sequence: Synthetic oligonucleotide
ugaccugugaagcaacagucaaugg

SEQ ID NO: 157729 - RNA, 25 nt, Artificial Sequence
  Description of Artificial Sequence: Synthetic oligonucleotide
cuaucucacacaucgacaaaccaau

SEQ ID NO: 157730 - RNA, 25 nt, Artificial Sequence
  Description of Artificial Sequence: Synthetic oligonucleotide
uguccucaauuguacugcuaccacu

SEQ ID NO: 157731 - RNA, 25 nt, Artificial Sequence
  Description of Artificial Sequence: Synthetic oligonucleotide
aaaccguagcuggcaagcggucuua

SEQ ID NO: 157732 - RNA, 25 nt, Artificial Sequence
  Description of Artificial Sequence: Synthetic oligonucleotide
uagcuggcaagcggucuuaccggcu

SEQ ID NO: 157733 - RNA, 25 nt, Artificial Sequence
  Description of Artificial Sequence: Synthetic oligonucleotide
uuguaugguuaaaagauggguuacc

SEQ ID NO: 157734 - RNA, 25 nt, Artificial Sequence
  Description of Artificial Sequence: Synthetic oligonucleotide
ugguuaaaagauggguuaccugcga

SEQ ID NO: 157735 - RNA, 25 nt, Artificial Sequence
  Description of Artificial Sequence: Synthetic oligonucleotide
cagggaauuauacaaucuugcugag

SEQ ID NO: 157736 - RNA, 25 nt, Artificial Sequence
  Description of Artificial Sequence: Synthetic oligonucleotide
acaaucuugcugagcauaaaacagu

SEQ ID NO: 157737 - RNA, 25 nt, Artificial Sequence
  Description of Artificial Sequence: Synthetic oligonucleotide
ccaauaaugaagaguccuuuauccu

SEQ ID NO: 157738 - RNA, 25 nt, Artificial Sequence
  Description of Artificial Sequence: Synthetic oligonucleotide
acuuuggauguuccaacgcaaguug

SEQ ID NO: 157739 - RNA, 25 nt, Artificial Sequence
  Description of Artificial Sequence: Synthetic oligonucleotide
aaugcuuccacuaaacugaaaccau

SEQ ID NO: 157740 - RNA, 25 nt, Artificial Sequence
  Description of Artificial Sequence: Synthetic oligonucleotide
gagaaaguuugacuuuguuaaauau

SEQ ID NO: 157741 - RNA, 25 nt, Artificial Sequence
  Description of Artificial Sequence: Synthetic oligonucleotide
aaagaacuacuguauauuaaaaguu

SEQ ID NO: 157742 - RNA, 25 nt, Artificial Sequence
  Description of Artificial Sequence: Synthetic oligonucleotide
uuagaaauacggguuuugacuuaac

SEQ ID NO: 157743 - RNA, 25 nt, Artificial Sequence
  Description of Artificial Sequence: Synthetic oligonucleotide
aacauggguacagcaaacucagcac

SEQ ID NO: 157744 - RNA, 25 nt, Artificial Sequence
  Description of Artificial Sequence: Synthetic oligonucleotide
aaagacacagaagaugcugaccuca

SEQ ID NO: 157745 - RNA, 25 nt, Artificial Sequence
  Description of Artificial Sequence: Synthetic oligonucleotide
uaguagggagguuuauucagaucgc

SEQ ID NO: 157746 - RNA, 25 nt, Artificial Sequence
  Description of Artificial Sequence: Synthetic oligonucleotide
gccuucugcagcaggguucugggau

SEQ ID NO: 157747 - RNA, 25 nt, Artificial Sequence
  Description of Artificial Sequence: Synthetic oligonucleotide
ggucugguacauauuggaaauuaug

SEQ ID NO: 157748 - RNA, 25 nt, Artificial Sequence
  Description of Artificial Sequence: Synthetic oligonucleotide
cuaguccuuccgauggaagcacuag

SEQ ID NO: 157749 - RNA, 25 nt, Artificial Sequence
  Description of Artificial Sequence: Synthetic oligonucleotide
ccagugaauauuguuuuuaugugga

SEQ ID NO: 157750 - RNA, 25 nt, Artificial Sequence
  Description of Artificial Sequence: Synthetic oligonucleotide
augaauucaaguuggaauugguaga

SEQ ID NO: 157751 - RNA, 25 nt, Artificial Sequence
  Description of Artificial Sequence: Synthetic oligonucleotide
caggacacagauuuagacuuggaga

SEQ ID NO: 157752 - RNA, 25 nt, Artificial Sequence
  Description of Artificial Sequence: Synthetic oligonucleotide
cucaaagcacaguuacaguauucca

SEQ ID NO: 157753 - RNA, 25 nt, Artificial Sequence
  Description of Artificial Sequence: Synthetic oligonucleotide
accacugccaccacugaugaauuaa

SEQ ID NO: 157754 - RNA, 25 nt, Artificial Sequence
  Description of Artificial Sequence: Synthetic oligonucleotide
gaaacuacuagugccacaucaucac

SEQ ID NO: 157755 - RNA, 25 nt, Artificial Sequence
  Description of Artificial Sequence: Synthetic oligonucleotide
aagucggacagccucaccaaacaga

SEQ ID NO: 157756 - RNA, 25 nt, Artificial Sequence
  Description of Artificial Sequence: Synthetic oligonucleotide
gaaagcgaaaaauggaacaugaugg

SEQ ID NO: 157757 - RNA, 25 nt, Artificial Sequence
  Description of Artificial Sequence: Synthetic oligonucleotide
cccucugauuuagcauguagacugc

SEQ ID NO: 157758 - RNA, 25 nt, Artificial Sequence
  Description of Artificial Sequence: Synthetic oligonucleotide
ugagcuauuuaaggaucuauuuaug

SEQ ID NO: 157759 - RNA, 25 nt, Artificial Sequence
  Description of Artificial Sequence: Synthetic oligonucleotide
aaaaggugaaaaagcacuauuauca

SEQ ID NO: 157760 - RNA, 25 nt, Artificial Sequence
  Description of Artificial Sequence: Synthetic oligonucleotide
gaaaaagcacuauuaucaguucugc

SEQ ID NO: 157761 - RNA, 25 nt, Artificial Sequence
  Description of Artificial Sequence: Synthetic oligonucleotide
ggcugaaaagaaagauuaaaccuac

SEQ ID NO: 157762 - RNA, 25 nt, Artificial Sequence
  Description of Artificial Sequence: Synthetic oligonucleotide
uaaacccuuauaauaaaauccuucu

SEQ ID NO: 157763 - RNA, 25 nt, Artificial Sequence
  Description of Artificial Sequence: Synthetic oligonucleotide
cauacuauuagccaaugcuguagac

SEQ ID NO: 157764 - RNA, 25 nt, Artificial Sequence
  Description of Artificial Sequence: Synthetic oligonucleotide
gacagaagcauuuugauaggaauag

SEQ ID NO: 157765 - RNA, 25 nt, Artificial Sequence
  Description of Artificial Sequence: Synthetic oligonucleotide
agagcaaauaagauaauggcccuga

SEQ ID NO: 157766 - RNA, 25 nt, Artificial Sequence
  Description of Artificial Sequence: Synthetic oligonucleotide
ccaacauuuuucucuuccucaagca

SEQ ID NO: 157767 - RNA, 25 nt, Artificial Sequence
  Description of Artificial Sequence: Synthetic oligonucleotide
uuaaguaugagaaaaguucagccca

SEQ ID NO: 157768 - RNA, 25 nt, Artificial Sequence
  Description of Artificial Sequence: Synthetic oligonucleotide
caggaauaaagauggcugcugaacc

SEQ ID NO: 157769 - RNA, 25 nt, Artificial Sequence
  Description of Artificial Sequence: Synthetic oligonucleotide
aauuugaaugaccaaguucucuuca

SEQ ID NO: 157770 - RNA, 25 nt, Artificial Sequence
  Description of Artificial Sequence: Synthetic oligonucleotide
auguauaaagauagccagccuagag

SEQ ID NO: 157771 - RNA, 25 nt, Artificial Sequence
  Description of Artificial Sequence: Synthetic oligonucleotide
ggcuguaacuaucucugugaagugu

SEQ ID NO: 157772 - RNA, 25 nt, Artificial Sequence
  Description of Artificial Sequence: Synthetic oligonucleotide
ucugugaagugugagaaaauuucaa

SEQ ID NO: 157773 - RNA, 25 nt, Artificial Sequence
  Description of Artificial Sequence: Synthetic oligonucleotide
ccuuuaaggaaaugaauccuccuga

SEQ ID NO: 157774 - RNA, 25 nt, Artificial Sequence
  Description of Artificial Sequence: Synthetic oligonucleotide
aaggauacaaaaagugacaucauau

SEQ ID NO: 157775 - RNA, 25 nt, Artificial Sequence
  Description of Artificial Sequence: Synthetic oligonucleotide
agaugcaauuugaaucuucaucaua

SEQ ID NO: 157776 - RNA, 25 nt, Artificial Sequence
  Description of Artificial Sequence: Synthetic oligonucleotide
guucaaaacgaagacuagcuauuaa

SEQ ID NO: 157777 - RNA, 25 nt, Artificial Sequence
  Description of Artificial Sequence: Synthetic oligonucleotide
gugaaaccucaucucuacuaaaaau

SEQ ID NO: 157778 - RNA, 25 nt, Artificial Sequence
  Description of Artificial Sequence: Synthetic oligonucleotide
acgaaagagaagcucuaucucgccu

SEQ ID NO: 157779 - RNA, 25 nt, Artificial Sequence
  Description of Artificial Sequence: Synthetic oligonucleotide
cuccacaagcgccuucgguccaguu

SEQ ID NO: 157780 - RNA, 25 nt, Artificial Sequence
  Description of Artificial Sequence: Synthetic oligonucleotide
gagaagauuccaaagauguagccgc

SEQ ID NO: 157781 - RNA, 25 nt, Artificial Sequence
  Description of Artificial Sequence: Synthetic oligonucleotide
aaucuggauucaaugaggagacuug

SEQ ID NO: 157782 - RNA, 25 nt, Artificial Sequence
  Description of Artificial Sequence: Synthetic oligonucleotide
agaacagauuugagaguagugagga

SEQ ID NO: 157783 - RNA, 25 nt, Artificial Sequence
  Description of Artificial Sequence: Synthetic oligonucleotide
ccagagcugugcagaugaguacaaa

SEQ ID NO: 157784 - RNA, 25 nt, Artificial Sequence
  Description of Artificial Sequence: Synthetic oligonucleotide
ccucagauuguuguuguuaaugggc

SEQ ID NO: 157785 - RNA, 25 nt, Artificial Sequence
  Description of Artificial Sequence: Synthetic oligonucleotide
cuauuuuaauuauuuuuaauuuauu

SEQ ID NO: 157786 - RNA, 25 nt, Artificial Sequence
  Description of Artificial Sequence: Synthetic oligonucleotide
uuuaauuuauuaauauuuaaauaug

SEQ ID NO: 157787 - RNA, 25 nt, Artificial Sequence
  Description of Artificial Sequence: Synthetic oligonucleotide
augcaguuugaauauccuuuguuuc

SEQ ID NO: 157788 - RNA, 25 nt, Artificial Sequence
  Description of Artificial Sequence: Synthetic oligonucleotide
caugcugcuggcgucuaaguguuug

SEQ ID NO: 157789 - RNA, 25 nt, Artificial Sequence
  Description of Artificial Sequence: Synthetic oligonucleotide
agaugugcauuucaccugugacaaa

SEQ ID NO: 157790 - RNA, 25 nt, Artificial Sequence
  Description of Artificial Sequence: Synthetic oligonucleotide
ucaaaaccugugccaggcugaauua

SEQ ID NO: 157791 - RNA, 25 nt, Artificial Sequence
  Description of Artificial Sequence: Synthetic oligonucleotide
gaauguggguagucauucuuacaau

SEQ ID NO: 157792 - RNA, 25 nt, Artificial Sequence
  Description of Artificial Sequence: Synthetic oligonucleotide
auguggguagucauucuuacaauug

SEQ ID NO: 157793 - RNA, 25 nt, Artificial Sequence
  Description of Artificial Sequence: Synthetic oligonucleotide
ugaaaaugagcaucagagaguguac

SEQ ID NO: 157794 - RNA, 25 nt, Artificial Sequence
  Description of Artificial Sequence: Synthetic oligonucleotide
uugcuuuucauguagaacucagcag

SEQ ID NO: 157795 - RNA, 25 nt, Artificial Sequence
  Description of Artificial Sequence: Synthetic oligonucleotide
uguauuucuauauuuauuuucagua

SEQ ID NO: 157796 - RNA, 25 nt, Artificial Sequence
  Description of Artificial Sequence: Synthetic oligonucleotide
uuugauuaauguuucuuaaauggaa

SEQ ID NO: 157797 - RNA, 25 nt, Artificial Sequence
  Description of Artificial Sequence: Synthetic oligonucleotide
caacguguauagugccuaaaauugu

SEQ ID NO: 157798 - RNA, 25 nt, Artificial Sequence
  Description of Artificial Sequence: Synthetic oligonucleotide
cauauccuuggcuacuaacaucugg

SEQ ID NO: 157799 - RNA, 25 nt, Artificial Sequence
  Description of Artificial Sequence: Synthetic oligonucleotide
uacuaacaucuggagacugugagcu

SEQ ID NO: 157800 - RNA, 25 nt, Artificial Sequence
  Description of Artificial Sequence: Synthetic oligonucleotide
cauaaguugugugcuuuuuauuaau

SEQ ID NO: 157801 - RNA, 25 nt, Artificial Sequence
  Description of Artificial Sequence: Synthetic oligonucleotide
gcaucauuuuggcucuucuuacauu

SEQ ID NO: 157802 - RNA, 25 nt, Artificial Sequence
  Description of Artificial Sequence: Synthetic oligonucleotide
gcucuucuuacauuuguaaaaaugu

SEQ ID NO: 157803 - RNA, 25 nt, Artificial Sequence
  Description of Artificial Sequence: Synthetic oligonucleotide
agauuaggucaucuuaauucauauu

SEQ ID NO: 157804 - RNA, 25 nt, Artificial Sequence
  Description of Artificial Sequence: Synthetic oligonucleotide
auggaauugaaagaacuaaucauga

SEQ ID NO: 157805 - RNA, 25 nt, Artificial Sequence
  Description of Artificial Sequence: Synthetic oligonucleotide
cacacucauuccuucugcucuuggg

SEQ ID NO: 157806 - RNA, 25 nt, Artificial Sequence
  Description of Artificial Sequence: Synthetic oligonucleotide
uguagagguaaccaguagcuuugag

SEQ ID NO: 157807 - RNA, 25 nt, Artificial Sequence
  Description of Artificial Sequence: Synthetic oligonucleotide
caaccacaugccacguaauauuuca

SEQ ID NO: 157808 - RNA, 25 nt, Artificial Sequence
  Description of Artificial Sequence: Synthetic oligonucleotide
ucggaaacaaguuauucucuucacu

SEQ ID NO: 157809 - RNA, 25 nt, Artificial Sequence
  Description of Artificial Sequence: Synthetic oligonucleotide
acucccaauaacuaaugcuaagaaa

SEQ ID NO: 157810 - RNA, 25 nt, Artificial Sequence
  Description of Artificial Sequence: Synthetic oligonucleotide
aaugcuaagaaaugcugaaaaucaa

SEQ ID NO: 157811 - RNA, 25 nt, Artificial Sequence
  Description of Artificial Sequence: Synthetic oligonucleotide
gucuuucucuaaauaugauuacuuu

SEQ ID NO: 157812 - RNA, 25 nt, Artificial Sequence
  Description of Artificial Sequence: Synthetic oligonucleotide
ugaauuucaggcauuuuguucuaca

SEQ ID NO: 157813 - RNA, 25 nt, Artificial Sequence
  Description of Artificial Sequence: Synthetic oligonucleotide
cgauucccucucacccgggacucuc

SEQ ID NO: 157814 - RNA, 25 nt, Artificial Sequence
  Description of Artificial Sequence: Synthetic oligonucleotide
aggaaagugaaccuuuaaaguaaag

SEQ ID NO: 157815 - RNA, 25 nt, Artificial Sequence
  Description of Artificial Sequence: Synthetic oligonucleotide
gaggcugcaugcucuggaagccugg

SEQ ID NO: 157816 - RNA, 25 nt, Artificial Sequence
  Description of Artificial Sequence: Synthetic oligonucleotide
ucucugaacagaaaacaaaagagag

SEQ ID NO: 157817 - RNA, 25 nt, Artificial Sequence
  Description of Artificial Sequence: Synthetic oligonucleotide
aacuuggcuguaaucaguuaugccg

SEQ ID NO: 157818 - RNA, 25 nt, Artificial Sequence
  Description of Artificial Sequence: Synthetic oligonucleotide
agaagccaaaauuaaaagaagucca

SEQ ID NO: 157819 - RNA, 25 nt, Artificial Sequence
  Description of Artificial Sequence: Synthetic oligonucleotide
auuaaaagaaguccaggugagguua

SEQ ID NO: 157820 - RNA, 25 nt, Artificial Sequence
  Description of Artificial Sequence: Synthetic oligonucleotide
gaauccggauuaucgggaagaggac

SEQ ID NO: 157821 - RNA, 25 nt, Artificial Sequence
  Description of Artificial Sequence: Synthetic oligonucleotide
aaugugacaucaaagcaaguauugu

SEQ ID NO: 157822 - RNA, 25 nt, Artificial Sequence
  Description of Artificial Sequence: Synthetic oligonucleotide
caucaaagcaaguauuguagcacuc

SEQ ID NO: 157823 - RNA, 25 nt, Artificial Sequence
  Description of Artificial Sequence: Synthetic oligonucleotide
agagagagaaaacaaaaccacaaau

SEQ ID NO: 157824 - RNA, 25 nt, Artificial Sequence
  Description of Artificial Sequence: Synthetic oligonucleotide
ucgcuguaguauuuaagcccauaca

SEQ ID NO: 157825 - RNA, 25 nt, Artificial Sequence
  Description of Artificial Sequence: Synthetic oligonucleotide
cgcuguaguauuuaagcccauacag

SEQ ID NO: 157826 - RNA, 25 nt, Artificial Sequence
  Description of Artificial Sequence: Synthetic oligonucleotide
auuuaagcccauacagaaaccuucc

SEQ ID NO: 157827 - RNA, 25 nt, Artificial Sequence
  Description of Artificial Sequence: Synthetic oligonucleotide
auuaaaauaaacaugguauaccuac

SEQ ID NO: 157828 - RNA, 25 nt, Artificial Sequence
  Description of Artificial Sequence: Synthetic oligonucleotide
cuguucugaucggccaguuuucgga

SEQ ID NO: 157829 - RNA, 25 nt, Artificial Sequence
  Description of Artificial Sequence: Synthetic oligonucleotide
aaauaauuugaacuuuggaacaggg

SEQ ID NO: 157830 - RNA, 25 nt, Artificial Sequence
  Description of Artificial Sequence: Synthetic oligonucleotide
ugcgaccuuaauuuaacuuuccagu

SEQ ID NO: 157831 - RNA, 25 nt, Artificial Sequence
  Description of Artificial Sequence: Synthetic oligonucleotide
cugagaaagcuaaaguuugguuuug

SEQ ID NO: 157832 - RNA, 25 nt, Artificial Sequence
  Description of Artificial Sequence: Synthetic oligonucleotide
aguaaagaugcuacuucccacugua

SEQ ID NO: 157833 - RNA, 25 nt, Artificial Sequence
  Description of Artificial Sequence: Synthetic oligonucleotide
cugcuuaauugcugauaccauauga

SEQ ID NO: 157834 - RNA, 25 nt, Artificial Sequence
  Description of Artificial Sequence: Synthetic oligonucleotide
uaccauaugaaugaaacaugggcug

SEQ ID NO: 157835 - RNA, 25 nt, Artificial Sequence
  Description of Artificial Sequence: Synthetic oligonucleotide
aacuuucuuauccaacuuuuucaua

SEQ ID NO: 157836 - RNA, 25 nt, Artificial Sequence
  Description of Artificial Sequence: Synthetic oligonucleotide
ccuugcaugacaucaugaggccgga

SEQ ID NO: 157837 - RNA, 25 nt, Artificial Sequence
  Description of Artificial Sequence: Synthetic oligonucleotide
ugaauuuguauaugacugcauuugu

SEQ ID NO: 157838 - RNA, 25 nt, Artificial Sequence
  Description of Artificial Sequence: Synthetic oligonucleotide
gaauccuaguagaauguuuacuacc

SEQ ID NO: 157839 - RNA, 25 nt, Artificial Sequence
  Description of Artificial Sequence: Synthetic oligonucleotide
gaaagggaagaauuuuuugaugaaa

SEQ ID NO: 157840 - RNA, 25 nt, Artificial Sequence
  Description of Artificial Sequence: Synthetic oligonucleotide
uaucggcaugccagugugugaauuu

SEQ ID NO: 157841 - RNA, 25 nt, Artificial Sequence
  Description of Artificial Sequence: Synthetic oligonucleotide
caccucauaguagagcaauguaugu

SEQ ID NO: 157842 - RNA, 25 nt, Artificial Sequence
  Description of Artificial Sequence: Synthetic oligonucleotide
ccagaauugccaaagcacauauaua

SEQ ID NO: 157843 - RNA, 25 nt, Artificial Sequence
  Description of Artificial Sequence: Synthetic oligonucleotide
uggugaucuggguaauaguuucucc

SEQ ID NO: 157844 - RNA, 25 nt, Artificial Sequence
  Description of Artificial Sequence: Synthetic oligonucleotide
gaucuggguaauaguuucuccaaau

SEQ ID NO: 157845 - RNA, 25 nt, Artificial Sequence
  Description of Artificial Sequence: Synthetic oligonucleotide
ggaugugaugaauacuuccuagaaa

SEQ ID NO: 157846 - RNA, 25 nt, Artificial Sequence
  Description of Artificial Sequence: Synthetic oligonucleotide
cauuuccacagcuacaccauauaug

SEQ ID NO: 157847 - RNA, 25 nt, Artificial Sequence
  Description of Artificial Sequence: Synthetic oligonucleotide
acagcuacaccauauaugaauggag

SEQ ID NO: 157848 - RNA, 25 nt, Artificial Sequence
  Description of Artificial Sequence: Synthetic oligonucleotide
ugcaguucuuacacgagaagaagau

SEQ ID NO: 157849 - RNA, 25 nt, Artificial Sequence
  Description of Artificial Sequence: Synthetic oligonucleotide
acgagaagaagaucauuuacaggga

SEQ ID NO: 157850 - RNA, 25 nt, Artificial Sequence
  Description of Artificial Sequence: Synthetic oligonucleotide
cgagaagaagaucauuuacagggac

SEQ ID NO: 157851 - RNA, 25 nt, Artificial Sequence
  Description of Artificial Sequence: Synthetic oligonucleotide
aagaagaucauuuacagggaccuga

SEQ ID NO: 157852 - RNA, 25 nt, Artificial Sequence
  Description of Artificial Sequence: Synthetic oligonucleotide
agaggaagagguguuugacugcauc

SEQ ID NO: 157853 - RNA, 25 nt, Artificial Sequence
  Description of Artificial Sequence: Synthetic oligonucleotide
gaggaagagguguuugacugcaucg

SEQ ID NO: 157854 - RNA, 25 nt, Artificial Sequence
  Description of Artificial Sequence: Synthetic oligonucleotide
cuacuuugagggcgaguucacaggg

SEQ ID NO: 157855 - RNA, 25 nt, Artificial Sequence
  Description of Artificial Sequence: Synthetic oligonucleotide
agggcaucuccuggcaccucugucc

SEQ ID NO: 157856 - RNA, 25 nt, Artificial Sequence
  Description of Artificial Sequence: Synthetic oligonucleotide
ggagugauaugguuugucuuuuuaa

SEQ ID NO: 157857 - RNA, 25 nt, Artificial Sequence
  Description of Artificial Sequence: Synthetic oligonucleotide
gagugauaugguuugucuuuuuaag

SEQ ID NO: 157858 - RNA, 25 nt, Artificial Sequence
  Description of Artificial Sequence: Synthetic oligonucleotide
ugcaguaaagauccuaaagguuguc

SEQ ID NO: 157859 - RNA, 25 nt, Artificial Sequence
  Description of Artificial Sequence: Synthetic oligonucleotide
aguaaagauccuaaagguugucgac

SEQ ID NO: 157860 - RNA, 25 nt, Artificial Sequence
  Description of Artificial Sequence: Synthetic oligonucleotide
ugacaaaggacaaccuggcaauugu

SEQ ID NO: 157861 - RNA, 25 nt, Artificial Sequence
  Description of Artificial Sequence: Synthetic oligonucleotide
gcaauugugacccaguggugcgagg

SEQ ID NO: 157862 - RNA, 25 nt, Artificial Sequence
  Description of Artificial Sequence: Synthetic oligonucleotide
aacaucauccauagagacaugaaau

SEQ ID NO: 157863 - RNA, 25 nt, Artificial Sequence
  Description of Artificial Sequence: Synthetic oligonucleotide
ugaaauccaacaauauauuucucca

SEQ ID NO: 157864 - RNA, 25 nt, Artificial Sequence
  Description of Artificial Sequence: Synthetic oligonucleotide
aacaauauauuucuccaugaaggcu

SEQ ID NO: 157865 - RNA, 25 nt, Artificial Sequence
  Description of Artificial Sequence: Synthetic oligonucleotide
aacaguaaagucacgcuggaguggu

SEQ ID NO: 157866 - RNA, 25 nt, Artificial Sequence
  Description of Artificial Sequence: Synthetic oligonucleotide
ugugaagaaaguaaaggaagagagg

SEQ ID NO: 157867 - RNA, 25 nt, Artificial Sequence
  Description of Artificial Sequence: Synthetic oligonucleotide
cuuccgagccauccuugcaucgggc

SEQ ID NO: 157868 - RNA, 25 nt, Artificial Sequence
  Description of Artificial Sequence: Synthetic oligonucleotide
aauggagguugaauauccuacugug

SEQ ID NO: 157869 - RNA, 25 nt, Artificial Sequence
  Description of Artificial Sequence: Synthetic oligonucleotide
ggagguugaauauccuacuguguaa

SEQ ID NO: 157870 - RNA, 25 nt, Artificial Sequence
  Description of Artificial Sequence: Synthetic oligonucleotide
auuuugaguuuucccuuguagugua

SEQ ID NO: 157871 - RNA, 25 nt, Artificial Sequence
  Description of Artificial Sequence: Synthetic oligonucleotide
uauccuguuuguucuuuguugauug

SEQ ID NO: 157872 - RNA, 25 nt, Artificial Sequence
  Description of Artificial Sequence: Synthetic oligonucleotide
ccuguuuguucuuuguugauugaaa

SEQ ID NO: 157873 - RNA, 25 nt, Artificial Sequence
  Description of Artificial Sequence: Synthetic oligonucleotide
cucuacagccuucuuuuucuuccau

SEQ ID NO: 157874 - RNA, 25 nt, Artificial Sequence
  Description of Artificial Sequence: Synthetic oligonucleotide
ucuuccauagcuaaucuuccuucua

SEQ ID NO: 157875 - RNA, 25 nt, Artificial Sequence
  Description of Artificial Sequence: Synthetic oligonucleotide
auaaucuuccuguugaaugcuucau

SEQ ID NO: 157876 - RNA, 25 nt, Artificial Sequence
  Description of Artificial Sequence: Synthetic oligonucleotide
uaaucuuccuguugaaugcuucaug

SEQ ID NO: 157877 - RNA, 25 nt, Artificial Sequence
  Description of Artificial Sequence: Synthetic oligonucleotide
cuucaugacuugaauucuacuuuga

SEQ ID NO: 157878 - RNA, 25 nt, Artificial Sequence
  Description of Artificial Sequence: Synthetic oligonucleotide
aagagggagagaagcaacuacagac

SEQ ID NO: 157879 - RNA, 25 nt, Artificial Sequence
  Description of Artificial Sequence: Synthetic oligonucleotide
cgucuccuaccagaccaaggucaac

SEQ ID NO: 157880 - RNA, 25 nt, Artificial Sequence
  Description of Artificial Sequence: Synthetic oligonucleotide
gaucaaucggcccgacuaucucgac

SEQ ID NO: 157881 - RNA, 25 nt, Artificial Sequence
  Description of Artificial Sequence: Synthetic oligonucleotide
ggacgaacauccaaccuucccaaac

SEQ ID NO: 157882 - RNA, 25 nt, Artificial Sequence
  Description of Artificial Sequence: Synthetic oligonucleotide
agggucggaacccaagcuuagaacu

SEQ ID NO: 157883 - RNA, 25 nt, Artificial Sequence
  Description of Artificial Sequence: Synthetic oligonucleotide
ucggaacccaagcuuagaacuuuaa

SEQ ID NO: 157884 - RNA, 25 nt, Artificial Sequence
  Description of Artificial Sequence: Synthetic oligonucleotide
acccaagcuuagaacuuuaagcaac

SEQ ID NO: 157885 - RNA, 25 nt, Artificial Sequence
  Description of Artificial Sequence: Synthetic oligonucleotide
gaacuuuaagcaacaagaccaccac

SEQ ID NO: 157886 - RNA, 25 nt, Artificial Sequence
  Description of Artificial Sequence: Synthetic oligonucleotide
acuauucaguggcgagaaauaaagu

SEQ ID NO: 157887 - RNA, 25 nt, Artificial Sequence
  Description of Artificial Sequence: Synthetic oligonucleotide
cuauucaguggcgagaaauaaaguu

SEQ ID NO: 157888 - RNA, 25 nt, Artificial Sequence
  Description of Artificial Sequence: Synthetic oligonucleotide
aaacacagauaacaggaaaugaucc

SEQ ID NO: 157889 - RNA, 25 nt, Artificial Sequence
  Description of Artificial Sequence: Synthetic oligonucleotide
cuuaagaaaagagaagaaaugaaac

SEQ ID NO: 157890 - RNA, 25 nt, Artificial Sequence
  Description of Artificial Sequence: Synthetic oligonucleotide
cugaaggaguguguuuccauccucc

SEQ ID NO: 157891 - RNA, 25 nt, Artificial Sequence
  Description of Artificial Sequence: Synthetic oligonucleotide
ucaccgcgggacugaaaaucuuuga

SEQ ID NO: 157892 - RNA, 25 nt, Artificial Sequence
  Description of Artificial Sequence: Synthetic oligonucleotide
agcagaaauaagcgugccguucagg

SEQ ID NO: 157893 - RNA, 25 nt, Artificial Sequence
  Description of Artificial Sequence: Synthetic oligonucleotide
aagcgugccguucaggguccagaag

SEQ ID NO: 157894 - RNA, 25 nt, Artificial Sequence
  Description of Artificial Sequence: Synthetic oligonucleotide
agaaacagucacucaagacugcuug

SEQ ID NO: 157895 - RNA, 25 nt, Artificial Sequence
  Description of Artificial Sequence: Synthetic oligonucleotide
agaggaagaagguccaugucuuugg

SEQ ID NO: 157896 - RNA, 25 nt, Artificial Sequence
  Description of Artificial Sequence: Synthetic oligonucleotide
uguauucaaaauaugccugaaacac

SEQ ID NO: 157897 - RNA, 25 nt, Artificial Sequence
  Description of Artificial Sequence: Synthetic oligonucleotide
auuuuccucccuuucucuguaccuc

SEQ ID NO: 157898 - RNA, 25 nt, Artificial Sequence
  Description of Artificial Sequence: Synthetic oligonucleotide
caaagaaagauagagcaagacaaga

SEQ ID NO: 157899 - RNA, 25 nt, Artificial Sequence
  Description of Artificial Sequence: Synthetic oligonucleotide
aagaaagauagagcaagacaagaaa

SEQ ID NO: 157900 - RNA, 25 nt, Artificial Sequence
  Description of Artificial Sequence: Synthetic oligonucleotide
gaaagcauuuguuuguacaagaucc

SEQ ID NO: 157901 - RNA, 25 nt, Artificial Sequence
  Description of Artificial Sequence: Synthetic oligonucleotide
ugaguuaaacgaacguacuugcaga

SEQ ID NO: 157902 - RNA, 25 nt, Artificial Sequence
  Description of Artificial Sequence: Synthetic oligonucleotide
acugauacagaacgaucgauacaga

SEQ ID NO: 157903 - RNA, 25 nt, Artificial Sequence
  Description of Artificial Sequence: Synthetic oligonucleotide
auauuauauauauauaaaaauaaau

SEQ ID NO: 157904 - RNA, 25 nt, Artificial Sequence
  Description of Artificial Sequence: Synthetic oligonucleotide
auuauauauauauaaaaauaaauau

SEQ ID NO: 157905 - RNA, 25 nt, Artificial Sequence
  Description of Artificial Sequence: Synthetic oligonucleotide
ucacuggauguauuugacugcugug

SEQ ID NO: 157906 - RNA, 25 nt, Artificial Sequence
  Description of Artificial Sequence: Synthetic oligonucleotide
cagggaagaggaggagaugagagac

SEQ ID NO: 157907 - RNA, 25 nt, Artificial Sequence
  Description of Artificial Sequence: Synthetic oligonucleotide
augaucuuuuuuuugucccacuugg

SEQ ID NO: 157908 - RNA, 27 nt, Artificial Sequence
  Description of Artificial Sequence: Synthetic oligonucleotide
ggccgugaacuccucaucaaaauaccu

SEQ ID NO: 157909 - RNA, 27 nt, Artificial Sequence
  Description of Artificial Sequence: Synthetic oligonucleotide
uggugugauggugaucaucugggccgu

SEQ ID NO: 157910 - RNA, 27 nt, Artificial Sequence
  Description of Artificial Sequence: Synthetic oligonucleotide
aaacccgcaggauaguuuucuucccua

SEQ ID NO: 157911 - RNA, 27 nt, Artificial Sequence
  Description of Artificial Sequence: Synthetic oligonucleotide
caaacuggaugaaauaaauuaaaaccc

SEQ ID NO: 157912 - RNA, 27 nt, Artificial Sequence
  Description of Artificial Sequence: Synthetic oligonucleotide
agaaguccuuaacauuucccuacguga

SEQ ID NO: 157913 - RNA, 27 nt, Artificial Sequence
  Description of Artificial Sequence: Synthetic oligonucleotide
cucugucccacuggguaaacccuggcc

SEQ ID NO: 157914 - RNA, 27 nt, Artificial Sequence
  Description of Artificial Sequence: Synthetic oligonucleotide
cacaauaacaaauuuaaaccuugcucc

SEQ ID NO: 157915 - RNA, 27 nt, Artificial Sequence
  Description of Artificial Sequence: Synthetic oligonucleotide
aaaugcauuugaacaacauaauacaca

SEQ ID NO: 157916 - RNA, 27 nt, Artificial Sequence
  Description of Artificial Sequence: Synthetic oligonucleotide
ggcuuuccugucacaaagauuaaaaac

SEQ ID NO: 157917 - RNA, 27 nt, Artificial Sequence
  Description of Artificial Sequence: Synthetic oligonucleotide
agggcuuuccugucacaaagauuaaaa

SEQ ID NO: 157918 - RNA, 27 nt, Artificial Sequence
  Description of Artificial Sequence: Synthetic oligonucleotide
ggccaugcugggagacauaagcagcag

SEQ ID NO: 157919 - RNA, 27 nt, Artificial Sequence
  Description of Artificial Sequence: Synthetic oligonucleotide
ucagggagaagcuucugaaacacuucu

SEQ ID NO: 157920 - RNA, 27 nt, Artificial Sequence
  Description of Artificial Sequence: Synthetic oligonucleotide
aagggcuucuuccuuauugauggucag

SEQ ID NO: 157921 - RNA, 27 nt, Artificial Sequence
  Description of Artificial Sequence: Synthetic oligonucleotide
ugaagggcuucuuccuuauugaugguc

SEQ ID NO: 157922 - RNA, 27 nt, Artificial Sequence
  Description of Artificial Sequence: Synthetic oligonucleotide
cgcugaagggcuucuuccuuauugaug

SEQ ID NO: 157923 - RNA, 27 nt, Artificial Sequence
  Description of Artificial Sequence: Synthetic oligonucleotide
gccgcugaagggcuucuuccuuauuga

SEQ ID NO: 157924 - RNA, 27 nt, Artificial Sequence
  Description of Artificial Sequence: Synthetic oligonucleotide
acuggccgcugaagggcuucuuccuua

SEQ ID NO: 157925 - RNA, 27 nt, Artificial Sequence
  Description of Artificial Sequence: Synthetic oligonucleotide
cggagcuuuucaccuuuaguuaugcuu

SEQ ID NO: 157926 - RNA, 27 nt, Artificial Sequence
  Description of Artificial Sequence: Synthetic oligonucleotide
ccggagcuuuucaccuuuaguuaugcu

SEQ ID NO: 157927 - RNA, 27 nt, Artificial Sequence
  Description of Artificial Sequence: Synthetic oligonucleotide
cagacuguugacuggcgugauguaguu

SEQ ID NO: 157928 - RNA, 27 nt, Artificial Sequence
  Description of Artificial Sequence: Synthetic oligonucleotide
cuuuugaacucugcuuaaauccagugg

SEQ ID NO: 157929 - RNA, 27 nt, Artificial Sequence
  Description of Artificial Sequence: Synthetic oligonucleotide
gcuuuugaacucugcuuaaauccagug

SEQ ID NO: 157930 - RNA, 27 nt, Artificial Sequence
  Description of Artificial Sequence: Synthetic oligonucleotide
agggcuuuugaacucugcuuaaaucca

SEQ ID NO: 157931 - RNA, 27 nt, Artificial Sequence
  Description of Artificial Sequence: Synthetic oligonucleotide
aagggcuuuugaacucugcuuaaaucc

SEQ ID NO: 157932 - RNA, 27 nt, Artificial Sequence
  Description of Artificial Sequence: Synthetic oligonucleotide
ugaagggcuuuugaacucugcuuaaau

SEQ ID NO: 157933 - RNA, 27 nt, Artificial Sequence
  Description of Artificial Sequence: Synthetic oligonucleotide
cugaagggcuuuugaacucugcuuaaa

SEQ ID NO: 157934 - RNA, 27 nt, Artificial Sequence
  Description of Artificial Sequence: Synthetic oligonucleotide
cgcugaagggcuuuugaacucugcuua

SEQ ID NO: 157935 - RNA, 27 nt, Artificial Sequence
  Description of Artificial Sequence: Synthetic oligonucleotide
cgagcggcuucacucagacccugaggc

SEQ ID NO: 157936 - RNA, 27 nt, Artificial Sequence
  Description of Artificial Sequence: Synthetic oligonucleotide
uugacuggcgugauguaguugcuuggg

SEQ ID NO: 157937 - RNA, 27 nt, Artificial Sequence
  Description of Artificial Sequence: Synthetic oligonucleotide
cacgcaccaagaagcugccauugaucc

SEQ ID NO: 157938 - RNA, 27 nt, Artificial Sequence
  Description of Artificial Sequence: Synthetic oligonucleotide
cugaugaauccaaugugggcuggaauc

SEQ ID NO: 157939 - RNA, 27 nt, Artificial Sequence
  Description of Artificial Sequence: Synthetic oligonucleotide
cuuagguauuccacauucucagcugug

SEQ ID NO: 157940 - RNA, 27 nt, Artificial Sequence
  Description of Artificial Sequence: Synthetic oligonucleotide
ugagccucaaauuaggagauacguuuu

SEQ ID NO: 157941 - RNA, 27 nt, Artificial Sequence
  Description of Artificial Sequence: Synthetic oligonucleotide
ccaauuguagagaaauuauuuuaggaa

SEQ ID NO: 157942 - RNA, 27 nt, Artificial Sequence
  Description of Artificial Sequence: Synthetic oligonucleotide
ggcuccuaacuagcugaaucuuccaau

SEQ ID NO: 157943 - RNA, 27 nt, Artificial Sequence
  Description of Artificial Sequence: Synthetic oligonucleotide
guggauauugacuaggagaguuuaaaa

SEQ ID NO: 157944 - RNA, 27 nt, Artificial Sequence
  Description of Artificial Sequence: Synthetic oligonucleotide
ugugacugaacauaacuguaggcugaa

SEQ ID NO: 157945 - RNA, 27 nt, Artificial Sequence
  Description of Artificial Sequence: Synthetic oligonucleotide
guaugugugugugacugaacauaacug

SEQ ID NO: 157946 - RNA, 27 nt, Artificial Sequence
  Description of Artificial Sequence: Synthetic oligonucleotide
aagcaaaaggaacauuuuguaugugug

SEQ ID NO: 157947 - RNA, 27 nt, Artificial Sequence
  Description of Artificial Sequence: Synthetic oligonucleotide
aaaaauuacuuuaaaagcaaaaggaac

SEQ ID NO: 157948 - RNA, 27 nt, Artificial Sequence
  Description of Artificial Sequence: Synthetic oligonucleotide
ccauugacuguugcuucacaggucaga

SEQ ID NO: 157949 - RNA, 27 nt, Artificial Sequence
  Description of Artificial Sequence: Synthetic oligonucleotide
auugguuugucgaugugugagauaguu

SEQ ID NO: 157950 - RNA, 27 nt, Artificial Sequence
  Description of Artificial Sequence: Synthetic oligonucleotide
agugguagcaguacaauugaggacaag

SEQ ID NO: 157951 - RNA, 27 nt, Artificial Sequence
  Description of Artificial Sequence: Synthetic oligonucleotide
uaagaccgcuugccagcuacgguuuca

SEQ ID NO: 157952 - RNA, 27 nt, Artificial Sequence
  Description of Artificial Sequence: Synthetic oligonucleotide
agccgguaagaccgcuugccagcuacg

SEQ ID NO: 157953 - RNA, 27 nt, Artificial Sequence
  Description of Artificial Sequence: Synthetic oligonucleotide
gguaacccaucuuuuaaccauacaacu

SEQ ID NO: 157954 - RNA, 27 nt, Artificial Sequence
  Description of Artificial Sequence: Synthetic oligonucleotide
ucgcagguaacccaucuuuuaaccaua

SEQ ID NO: 157955 - RNA, 27 nt, Artificial Sequence
  Description of Artificial Sequence: Synthetic oligonucleotide
cucagcaagauuguauaauucccugca

SEQ ID NO: 157956 - RNA, 27 nt, Artificial Sequence
  Description of Artificial Sequence: Synthetic oligonucleotide
acuguuuuaugcucagcaagauuguau

SEQ ID NO: 157957 - RNA, 27 nt, Artificial Sequence
  Description of Artificial Sequence: Synthetic oligonucleotide
aggauaaaggacucuucauuauuggaa

SEQ ID NO: 157958 - RNA, 27 nt, Artificial Sequence
  Description of Artificial Sequence: Synthetic oligonucleotide
caacuugcguuggaacauccaaagugu

SEQ ID NO: 157959 - RNA, 27 nt, Artificial Sequence
  Description of Artificial Sequence: Synthetic oligonucleotide
augguuucaguuuaguggaagcauuua

SEQ ID NO: 157960 - RNA, 27 nt, Artificial Sequence
  Description of Artificial Sequence: Synthetic oligonucleotide
auauuuaacaaagucaaacuuucucac

SEQ ID NO: 157961 - RNA, 27 nt, Artificial Sequence
  Description of Artificial Sequence: Synthetic oligonucleotide
aacuuuuaauauacaguaguucuuuuc

SEQ ID NO: 157962 - RNA, 27 nt, Artificial Sequence
  Description of Artificial Sequence: Synthetic oligonucleotide
guuaagucaaaacccguauuucuaaag

SEQ ID NO: 157963 - RNA, 27 nt, Artificial Sequence
  Description of Artificial Sequence: Synthetic oligonucleotide
gugcugaguuugcuguacccauguuga

SEQ ID NO: 157964 - RNA, 27 nt, Artificial Sequence
  Description of Artificial Sequence: Synthetic oligonucleotide
ugaggucagcaucuucugugucuuuac

SEQ ID NO: 157965 - RNA, 27 nt, Artificial Sequence
  Description of Artificial Sequence: Synthetic oligonucleotide
gcgaucugaauaaaccucccuacuagc

SEQ ID NO: 157966 - RNA, 27 nt, Artificial Sequence
  Description of Artificial Sequence: Synthetic oligonucleotide
aucccagaacccugcugcagaaggcca

SEQ ID NO: 157967 - RNA, 27 nt, Artificial Sequence
  Description of Artificial Sequence: Synthetic oligonucleotide
cauaauuuccaauauguaccagaccuu

SEQ ID NO: 157968 - RNA, 27 nt, Artificial Sequence
  Description of Artificial Sequence: Synthetic oligonucleotide
cuagugcuuccaucggaaggacuaggu

SEQ ID NO: 157969 - RNA, 27 nt, Artificial Sequence
  Description of Artificial Sequence: Synthetic oligonucleotide
uccacauaaaaacaauauucacuggga

SEQ ID NO: 157970 - RNA, 27 nt, Artificial Sequence
  Description of Artificial Sequence: Synthetic oligonucleotide
ucuaccaauuccaacuugaauucauug

SEQ ID NO: 157971 - RNA, 27 nt, Artificial Sequence
  Description of Artificial Sequence: Synthetic oligonucleotide
ucuccaagucuaaaucuguguccugag

SEQ ID NO: 157972 - RNA, 27 nt, Artificial Sequence
  Description of Artificial Sequence: Synthetic oligonucleotide
uggaauacuguaacugugcuuugagga

SEQ ID NO: 157973 - RNA, 27 nt, Artificial Sequence
  Description of Artificial Sequence: Synthetic oligonucleotide
uuaauucaucagugguggcagugguag

SEQ ID NO: 157974 - RNA, 27 nt, Artificial Sequence
  Description of Artificial Sequence: Synthetic oligonucleotide
gugaugauguggcacuaguaguuucuu

SEQ ID NO: 157975 - RNA, 27 nt, Artificial Sequence
  Description of Artificial Sequence: Synthetic oligonucleotide
ucuguuuggugaggcuguccgacuuug

SEQ ID NO: 157976 - RNA, 27 nt, Artificial Sequence
  Description of Artificial Sequence: Synthetic oligonucleotide
ccaucauguuccauuuuucgcuuucuc

SEQ ID NO: 157977 - RNA, 27 nt, Artificial Sequence
  Description of Artificial Sequence: Synthetic oligonucleotide
gcagucuacaugcuaaaucagagggua

SEQ ID NO: 157978 - RNA, 27 nt, Artificial Sequence
  Description of Artificial Sequence: Synthetic oligonucleotide
cauaaauagauccuuaaauagcucaaa

SEQ ID NO: 157979 - RNA, 27 nt, Artificial Sequence
  Description of Artificial Sequence: Synthetic oligonucleotide
ugauaauagugcuuuuucaccuuuuuc

SEQ ID NO: 157980 - RNA, 27 nt, Artificial Sequence
  Description of Artificial Sequence: Synthetic oligonucleotide
gcagaacugauaauagugcuuuuucac

SEQ ID NO: 157981 - RNA, 27 nt, Artificial Sequence
  Description of Artificial Sequence: Synthetic oligonucleotide
guagguuuaaucuuucuuuucagccau

SEQ ID NO: 157982 - RNA, 27 nt, Artificial Sequence
  Description of Artificial Sequence: Synthetic oligonucleotide
agaaggauuuuauuauaaggguuuaau

SEQ ID NO: 157983 - RNA, 27 nt, Artificial Sequence
  Description of Artificial Sequence: Synthetic oligonucleotide
gucuacagcauuggcuaauaguaugaa

SEQ ID NO: 157984 - RNA, 27 nt, Artificial Sequence
  Description of Artificial Sequence: Synthetic oligonucleotide
cuauuccuaucaaaaugcuucugucua

SEQ ID NO: 157985 - RNA, 27 nt, Artificial Sequence
  Description of Artificial Sequence: Synthetic oligonucleotide
ucagggccauuaucuuauuugcucuau

SEQ ID NO: 157986 - RNA, 27 nt, Artificial Sequence
  Description of Artificial Sequence: Synthetic oligonucleotide
ugcuugaggaagagaaaaauguugguc

SEQ ID NO: 157987 - RNA, 27 nt, Artificial Sequence
  Description of Artificial Sequence: Synthetic oligonucleotide
ugggcugaacuuuucucauacuuaaag

SEQ ID NO: 157988 - RNA, 27 nt, Artificial Sequence
  Description of Artificial Sequence: Synthetic oligonucleotide
gguucagcagccaucuuuauuccugcg

SEQ ID NO: 157989 - RNA, 27 nt, Artificial Sequence
  Description of Artificial Sequence: Synthetic oligonucleotide
ugaagagaacuuggucauucaaauuuc

SEQ ID NO: 157990 - RNA, 27 nt, Artificial Sequence
  Description of Artificial Sequence: Synthetic oligonucleotide
cucuaggcuggcuaucuuuauacauac

SEQ ID NO: 157991 - RNA, 27 nt, Artificial Sequence
  Description of Artificial Sequence: Synthetic oligonucleotide
acacuucacagagauaguuacagccau

SEQ ID NO: 157992 - RNA, 27 nt, Artificial Sequence
  Description of Artificial Sequence: Synthetic oligonucleotide
uugaaauuuucucacacuucacagaga

SEQ ID NO: 157993 - RNA, 27 nt, Artificial Sequence
  Description of Artificial Sequence: Synthetic oligonucleotide
ucaggaggauucauuuccuuaaaggaa

SEQ ID NO: 157994 - RNA, 27 nt, Artificial Sequence
  Description of Artificial Sequence: Synthetic oligonucleotide
auaugaugucacuuuuuguauccuuga

SEQ ID NO: 157995 - RNA, 27 nt, Artificial Sequence
  Description of Artificial Sequence: Synthetic oligonucleotide
uaugaugaagauucaaauugcaucuua

SEQ ID NO: 157996 - RNA, 27 nt, Artificial Sequence
  Description of Artificial Sequence: Synthetic oligonucleotide
uuaauagcuagucuucguuuugaacag

SEQ ID NO: 157997 - RNA, 27 nt, Artificial Sequence
  Description of Artificial Sequence: Synthetic oligonucleotide
auuuuuaguagagaugagguuucacca

SEQ ID NO: 157998 - RNA, 27 nt, Artificial Sequence
  Description of Artificial Sequence: Synthetic oligonucleotide
aggcgagauagagcuucucuuucguuc

SEQ ID NO: 157999 - RNA, 27 nt, Artificial Sequence
  Description of Artificial Sequence: Synthetic oligonucleotide
aacuggaccgaaggcgcuuguggagaa

SEQ ID NO: 158000 - RNA, 27 nt, Artificial Sequence
  Description of Artificial Sequence: Synthetic oligonucleotide
gcggcuacaucuuuggaaucuucuccu

SEQ ID NO: 158001 - RNA, 27 nt, Artificial Sequence
  Description of Artificial Sequence: Synthetic oligonucleotide
caagucuccucauugaauccagauugg

SEQ ID NO: 158002 - RNA, 27 nt, Artificial Sequence
  Description of Artificial Sequence: Synthetic oligonucleotide
uccucacuacucucaaaucuguucugg

SEQ ID NO: 158003 - RNA, 27 nt, Artificial Sequence
  Description of Artificial Sequence: Synthetic oligonucleotide
uuuguacucaucugcacagcucuggcu

SEQ ID NO: 158004 - RNA, 27 nt, Artificial Sequence
  Description of Artificial Sequence: Synthetic oligonucleotide
gcccauuaacaacaacaaucugaggug

SEQ ID NO: 158005 - RNA, 27 nt, Artificial Sequence
  Description of Artificial Sequence: Synthetic oligonucleotide
aauaaauuaaaaauaauuaaaauagug

SEQ ID NO: 158006 - RNA, 27 nt, Artificial Sequence
  Description of Artificial Sequence: Synthetic oligonucleotide
cauauuuaaauauuaauaaauuaaaaa

SEQ ID NO: 158007 - RNA, 27 nt, Artificial Sequence
  Description of Artificial Sequence: Synthetic oligonucleotide
gaaacaaaggauauucaaacugcauag

SEQ ID NO: 158008 - RNA, 27 nt, Artificial Sequence
  Description of Artificial Sequence: Synthetic oligonucleotide
caaacacuuagacgccagcagcauggg

SEQ ID NO: 158009 - RNA, 27 nt, Artificial Sequence
  Description of Artificial Sequence: Synthetic oligonucleotide
uuugucacaggugaaaugcacaucuga

SEQ ID NO: 158010 - RNA, 27 nt, Artificial Sequence
  Description of Artificial Sequence: Synthetic oligonucleotide
uaauucagccuggcacagguuuugauc

SEQ ID NO: 158011 - RNA, 27 nt, Artificial Sequence
  Description of Artificial Sequence: Synthetic oligonucleotide
auuguaagaaugacuacccacauucac

SEQ ID NO: 158012 - RNA, 27 nt, Artificial Sequence
  Description of Artificial Sequence: Synthetic oligonucleotide
caauuguaagaaugacuacccacauuc

SEQ ID NO: 158013 - RNA, 27 nt, Artificial Sequence
  Description of Artificial Sequence: Synthetic oligonucleotide
guacacucucugaugcucauuuucaua

SEQ ID NO: 158014 - RNA, 27 nt, Artificial Sequence
  Description of Artificial Sequence: Synthetic oligonucleotide
cugcugaguucuacaugaaaagcaaau

SEQ ID NO: 158015 - RNA, 27 nt, Artificial Sequence
  Description of Artificial Sequence: Synthetic oligonucleotide
uacugaaaauaaauauagaaauacaac

SEQ ID NO: 158016 - RNA, 27 nt, Artificial Sequence
  Description of Artificial Sequence: Synthetic oligonucleotide
uuccauuuaagaaacauuaaucaaaac

SEQ ID NO: 158017 - RNA, 27 nt, Artificial Sequence
  Description of Artificial Sequence: Synthetic oligonucleotide
acaauuuuaggcacuauacacguuguu

SEQ ID NO: 158018 - RNA, 27 nt, Artificial Sequence
  Description of Artificial Sequence: Synthetic oligonucleotide
ccagauguuaguagccaaggauauggu

SEQ ID NO: 158019 - RNA, 27 nt, Artificial Sequence
  Description of Artificial Sequence: Synthetic oligonucleotide
agcucacagucuccagauguuaguagc

SEQ ID NO: 158020 - RNA, 27 nt, Artificial Sequence
  Description of Artificial Sequence: Synthetic oligonucleotide
auuaauaaaaagcacacaacuuauggc

SEQ ID NO: 158021 - RNA, 27 nt, Artificial Sequence
  Description of Artificial Sequence: Synthetic oligonucleotide
aauguaagaagagccaaaaugaugcau

SEQ ID NO: 158022 - RNA, 27 nt, Artificial Sequence
  Description of Artificial Sequence: Synthetic oligonucleotide
acauuuuuacaaauguaagaagagcca

SEQ ID NO: 158023 - RNA, 27 nt, Artificial Sequence
  Description of Artificial Sequence: Synthetic oligonucleotide
aauaugaauuaagaugaccuaaucugu

SEQ ID NO: 158024 - RNA, 27 nt, Artificial Sequence
  Description of Artificial Sequence: Synthetic oligonucleotide
ucaugauuaguucuuucaauuccaucc

SEQ ID NO: 158025 - RNA, 27 nt, Artificial Sequence
  Description of Artificial Sequence: Synthetic oligonucleotide
cccaagagcagaaggaaugagugugca

SEQ ID NO: 158026 - RNA, 27 nt, Artificial Sequence
  Description of Artificial Sequence: Synthetic oligonucleotide
cucaaagcuacugguuaccucuacacc

SEQ ID NO: 158027 - RNA, 27 nt, Artificial Sequence
  Description of Artificial Sequence: Synthetic oligonucleotide
ugaaauauuacguggcaugugguuggg

SEQ ID NO: 158028 - RNA, 27 nt, Artificial Sequence
  Description of Artificial Sequence: Synthetic oligonucleotide
agugaagagaauaacuuguuuccgaag

SEQ ID NO: 158029 - RNA, 27 nt, Artificial Sequence
  Description of Artificial Sequence: Synthetic oligonucleotide
uuucuuagcauuaguuauugggaguga

SEQ ID NO: 158030 - RNA, 27 nt, Artificial Sequence
  Description of Artificial Sequence: Synthetic oligonucleotide
uugauuuucagcauuucuuagcauuag

SEQ ID NO: 158031 - RNA, 27 nt, Artificial Sequence
  Description of Artificial Sequence: Synthetic oligonucleotide
aaaguaaucauauuuagagaaagacag

SEQ ID NO: 158032 - RNA, 27 nt, Artificial Sequence
  Description of Artificial Sequence: Synthetic oligonucleotide
uguagaacaaaaugccugaaauucagc

SEQ ID NO: 158033 - RNA, 27 nt, Artificial Sequence
  Description of Artificial Sequence: Synthetic oligonucleotide
gagagucccgggugagagggaaucgcc

SEQ ID NO: 158034 - RNA, 27 nt, Artificial Sequence
  Description of Artificial Sequence: Synthetic oligonucleotide
cuuuacuuuaaagguucacuuuccuug

SEQ ID NO: 158035 - RNA, 27 nt, Artificial Sequence
  Description of Artificial Sequence: Synthetic oligonucleotide
ccaggcuuccagagcaugcagccuccu

SEQ ID NO: 158036 - RNA, 27 nt, Artificial Sequence
  Description of Artificial Sequence: Synthetic oligonucleotide
cucucuuuuguuuucuguucagagaaa

SEQ ID NO: 158037 - RNA, 27 nt, Artificial Sequence
  Description of Artificial Sequence: Synthetic oligonucleotide
cggcauaacugauuacagccaaguuca

SEQ ID NO: 158038 - RNA, 27 nt, Artificial Sequence
  Description of Artificial Sequence: Synthetic oligonucleotide
uggacuucuuuuaauuuuggcuucuuc

SEQ ID NO: 158039 - RNA, 27 nt, Artificial Sequence
  Description of Artificial Sequence: Synthetic oligonucleotide
uaaccucaccuggacuucuuuuaauuu

SEQ ID NO: 158040 - RNA, 27 nt, Artificial Sequence
  Description of Artificial Sequence: Synthetic oligonucleotide
guccucuucccgauaauccggauucag

SEQ ID NO: 158041 - RNA, 27 nt, Artificial Sequence
  Description of Artificial Sequence: Synthetic oligonucleotide
acaauacuugcuuugaugucacauuaa

SEQ ID NO: 158042 - RNA, 27 nt, Artificial Sequence
  Description of Artificial Sequence: Synthetic oligonucleotide
gagugcuacaauacuugcuuugauguc

SEQ ID NO: 158043 - RNA, 27 nt, Artificial Sequence
  Description of Artificial Sequence: Synthetic oligonucleotide
auuugugguuuuguuuucucucucucu

SEQ ID NO: 158044 - RNA, 27 nt, Artificial Sequence
  Description of Artificial Sequence: Synthetic oligonucleotide
uguaugggcuuaaauacuacagcgagg

SEQ ID NO: 158045 - RNA, 27 nt, Artificial Sequence
  Description of Artificial Sequence: Synthetic oligonucleotide
cuguaugggcuuaaauacuacagcgag

SEQ ID NO: 158046 - RNA, 27 nt, Artificial Sequence
  Description of Artificial Sequence: Synthetic oligonucleotide
ggaagguuucuguaugggcuuaaauac

SEQ ID NO: 158047 - RNA, 27 nt, Artificial Sequence
  Description of Artificial Sequence: Synthetic oligonucleotide
guagguauaccauguuuauuuuaauac

SEQ ID NO: 158048 - RNA, 27 nt, Artificial Sequence
  Description of Artificial Sequence: Synthetic oligonucleotide
uccgaaaacuggccgaucagaacagcc

SEQ ID NO: 158049 - RNA, 27 nt, Artificial Sequence
  Description of Artificial Sequence: Synthetic oligonucleotide
cccuguuccaaaguucaaauuauuugu

SEQ ID NO: 158050 - RNA, 27 nt, Artificial Sequence
  Description of Artificial Sequence: Synthetic oligonucleotide
acuggaaaguuaaauuaaggucgcaau

SEQ ID NO: 158051 - RNA, 27 nt, Artificial Sequence
  Description of Artificial Sequence: Synthetic oligonucleotide
caaaaccaaacuuuagcuuucucagcc

SEQ ID NO: 158052 - RNA, 27 nt, Artificial Sequence
  Description of Artificial Sequence: Synthetic oligonucleotide
uacagugggaaguagcaucuuuacuuu

SEQ ID NO: 158053 - RNA, 27 nt, Artificial Sequence
  Description of Artificial Sequence: Synthetic oligonucleotide
ucauaugguaucagcaauuaagcagua

SEQ ID NO: 158054 - RNA, 27 nt, Artificial Sequence
  Description of Artificial Sequence: Synthetic oligonucleotide
cagcccauguuucauucauaugguauc

SEQ ID NO: 158055 - RNA, 27 nt, Artificial Sequence
  Description of Artificial Sequence: Synthetic oligonucleotide
uaugaaaaaguuggauaagaaaguugg

SEQ ID NO: 158056 - RNA, 27 nt, Artificial Sequence
  Description of Artificial Sequence: Synthetic oligonucleotide
uccggccucaugaugucaugcaaggcu

SEQ ID NO: 158057 - RNA, 27 nt, Artificial Sequence
  Description of Artificial Sequence: Synthetic oligonucleotide
acaaaugcagucauauacaaauucagg

SEQ ID NO: 158058 - RNA, 27 nt, Artificial Sequence
  Description of Artificial Sequence: Synthetic oligonucleotide
gguaguaaacauucuacuaggauucuu

SEQ ID NO: 158059 - RNA, 27 nt, Artificial Sequence
  Description of Artificial Sequence: Synthetic oligonucleotide
uuucaucaaaaaauucuucccuuucug

SEQ ID NO: 158060 - RNA, 27 nt, Artificial Sequence
  Description of Artificial Sequence: Synthetic oligonucleotide
aaauucacacacuggcaugccgauagc

SEQ ID NO: 158061 - RNA, 27 nt, Artificial Sequence
  Description of Artificial Sequence: Synthetic oligonucleotide
acauacauugcucuacuaugaggugaa

SEQ ID NO: 158062 - RNA, 27 nt, Artificial Sequence
  Description of Artificial Sequence: Synthetic oligonucleotide
uauauaugugcuuuggcaauucuggug

SEQ ID NO: 158063 - RNA, 27 nt, Artificial Sequence
  Description of Artificial Sequence: Synthetic oligonucleotide
ggagaaacuauuacccagaucaccacu

SEQ ID NO: 158064 - RNA, 27 nt, Artificial Sequence
  Description of Artificial Sequence: Synthetic oligonucleotide
auuuggagaaacuauuacccagaucac

SEQ ID NO: 158065 - RNA, 27 nt, Artificial Sequence
  Description of Artificial Sequence: Synthetic oligonucleotide
uuucuaggaaguauucaucacauccac

SEQ ID NO: 158066 - RNA, 27 nt, Artificial Sequence
  Description of Artificial Sequence: Synthetic oligonucleotide
cauauaugguguagcuguggaaaugcg

SEQ ID NO: 158067 - RNA, 27 nt, Artificial Sequence
  Description of Artificial Sequence: Synthetic oligonucleotide
cuccauucauauaugguguagcugugg

SEQ ID NO: 158068 - RNA, 27 nt, Artificial Sequence
  Description of Artificial Sequence: Synthetic oligonucleotide
aucuucuucucguguaagaacugcagc

SEQ ID NO: 158069 - RNA, 27 nt, Artificial Sequence
  Description of Artificial Sequence: Synthetic oligonucleotide
ucccuguaaaugaucuucuucucgugu

SEQ ID NO: 158070 - RNA, 27 nt, Artificial Sequence
  Description of Artificial Sequence: Synthetic oligonucleotide
gucccuguaaaugaucuucuucucgug

SEQ ID NO: 158071 - RNA, 27 nt, Artificial Sequence
  Description of Artificial Sequence: Synthetic oligonucleotide
ucaggucccuguaaaugaucuucuucu

SEQ ID NO: 158072 - RNA, 27 nt, Artificial Sequence
  Description of Artificial Sequence: Synthetic oligonucleotide
gaugcagucaaacaccucuuccucugu

SEQ ID NO: 158073 - RNA, 27 nt, Artificial Sequence
  Description of Artificial Sequence: Synthetic oligonucleotide
cgaugcagucaaacaccucuuccucug

SEQ ID NO: 158074 - RNA, 27 nt, Artificial Sequence
  Description of Artificial Sequence: Synthetic oligonucleotide
cccugugaacucgcccucaaaguagcg

SEQ ID NO: 158075 - RNA, 27 nt, Artificial Sequence
  Description of Artificial Sequence: Synthetic oligonucleotide
ggacagaggugccaggagaugcccuca

SEQ ID NO: 158076 - RNA, 27 nt, Artificial Sequence
  Description of Artificial Sequence: Synthetic oligonucleotide
uuaaaaagacaaaccauaucacuccuu

SEQ ID NO: 158077 - RNA, 27 nt, Artificial Sequence
  Description of Artificial Sequence: Synthetic oligonucleotide
cuuaaaaagacaaaccauaucacuccu

SEQ ID NO: 158078 - RNA, 27 nt, Artificial Sequence
  Description of Artificial Sequence: Synthetic oligonucleotide
gacaaccuuuaggaucuuuacugcaac

SEQ ID NO: 158079 - RNA, 27 nt, Artificial Sequence
  Description of Artificial Sequence: Synthetic oligonucleotide
gucgacaaccuuuaggaucuuuacugc

SEQ ID NO: 158080 - RNA, 27 nt, Artificial Sequence
  Description of Artificial Sequence: Synthetic oligonucleotide
acaauugccagguuguccuuugucaug

SEQ ID NO: 158081 - RNA, 27 nt, Artificial Sequence
  Description of Artificial Sequence: Synthetic oligonucleotide
ccucgcaccacugggucacaauugcca

SEQ ID NO: 158082 - RNA, 27 nt, Artificial Sequence
  Description of Artificial Sequence: Synthetic oligonucleotide
auuucaugucucuauggaugauguucu

SEQ ID NO: 158083 - RNA, 27 nt, Artificial Sequence
  Description of Artificial Sequence: Synthetic oligonucleotide
uggagaaauauauuguuggauuucaug

SEQ ID NO: 158084 - RNA, 27 nt, Artificial Sequence
  Description of Artificial Sequence: Synthetic oligonucleotide
agccuucauggagaaauauauuguugg

SEQ ID NO: 158085 - RNA, 27 nt, Artificial Sequence
  Description of Artificial Sequence: Synthetic oligonucleotide
accacuccagcgugacuuuacuguugc

SEQ ID NO: 158086 - RNA, 27 nt, Artificial Sequence
  Description of Artificial Sequence: Synthetic oligonucleotide
ccucucuuccuuuacuuucuucacaca

SEQ ID NO: 158087 - RNA, 27 nt, Artificial Sequence
  Description of Artificial Sequence: Synthetic oligonucleotide
gcccgaugcaaggauggcucggaagcg

SEQ ID NO: 158088 - RNA, 27 nt, Artificial Sequence
  Description of Artificial Sequence: Synthetic oligonucleotide
cacaguaggauauucaaccuccauuuc

SEQ ID NO: 158089 - RNA, 27 nt, Artificial Sequence
  Description of Artificial Sequence: Synthetic oligonucleotide
uuacacaguaggauauucaaccuccau

SEQ ID NO: 158090 - RNA, 27 nt, Artificial Sequence
  Description of Artificial Sequence: Synthetic oligonucleotide
uacacuacaagggaaaacucaaaaucu

SEQ ID NO: 158091 - RNA, 27 nt, Artificial Sequence
  Description of Artificial Sequence: Synthetic oligonucleotide
caaucaacaaagaacaaacaggauaaa

SEQ ID NO: 158092 - RNA, 27 nt, Artificial Sequence
  Description of Artificial Sequence: Synthetic oligonucleotide
uuucaaucaacaaagaacaaacaggau

SEQ ID NO: 158093 - RNA, 27 nt, Artificial Sequence
  Description of Artificial Sequence: Synthetic oligonucleotide
auggaagaaaaagaaggcuguagagaa

SEQ ID NO: 158094 - RNA, 27 nt, Artificial Sequence
  Description of Artificial Sequence: Synthetic oligonucleotide
uagaaggaagauuagcuauggaagaaa

SEQ ID NO: 158095 - RNA, 27 nt, Artificial Sequence
  Description of Artificial Sequence: Synthetic oligonucleotide
augaagcauucaacaggaagauuauuu

SEQ ID NO: 158096 - RNA, 27 nt, Artificial Sequence
  Description of Artificial Sequence: Synthetic oligonucleotide
caugaagcauucaacaggaagauuauu

SEQ ID NO: 158097 - RNA, 27 nt, Artificial Sequence
  Description of Artificial Sequence: Synthetic oligonucleotide
ucaaaguagaauucaagucaugaagca

SEQ ID NO: 158098 - RNA, 27 nt, Artificial Sequence
  Description of Artificial Sequence: Synthetic oligonucleotide
gucuguaguugcuucucucccucuuag

SEQ ID NO: 158099 - RNA, 27 nt, Artificial Sequence
  Description of Artificial Sequence: Synthetic oligonucleotide
guugaccuuggucugguaggagacggc

SEQ ID NO: 158100 - RNA, 27 nt, Artificial Sequence
  Description of Artificial Sequence: Synthetic oligonucleotide
gucgagauagucgggccgauugaucuc

SEQ ID NO: 158101 - RNA, 27 nt, Artificial Sequence
  Description of Artificial Sequence: Synthetic oligonucleotide
guuugggaagguuggauguucguccuc

SEQ ID NO: 158102 - RNA, 27 nt, Artificial Sequence
  Description of Artificial Sequence: Synthetic oligonucleotide
aguucuaagcuuggguuccgacccuaa

SEQ ID NO: 158103 - RNA, 27 nt, Artificial Sequence
  Description of Artificial Sequence: Synthetic oligonucleotide
uuaaaguucuaagcuuggguuccgacc

SEQ ID NO: 158104 - RNA, 27 nt, Artificial Sequence
  Description of Artificial Sequence: Synthetic oligonucleotide
guugcuuaaaguucuaagcuuggguuc

SEQ ID NO: 158105 - RNA, 27 nt, Artificial Sequence
  Description of Artificial Sequence: Synthetic oligonucleotide
gugguggucuuguugcuuaaaguucua

SEQ ID NO: 158106 - RNA, 27 nt, Artificial Sequence
  Description of Artificial Sequence: Synthetic oligonucleotide
acuuuauuucucgccacugaauaguag

SEQ ID NO: 158107 - RNA, 27 nt, Artificial Sequence
  Description of Artificial Sequence: Synthetic oligonucleotide
aacuuuauuucucgccacugaauagua

SEQ ID NO: 158108 - RNA, 27 nt, Artificial Sequence
  Description of Artificial Sequence: Synthetic oligonucleotide
ggaucauuuccuguuaucuguguuugu

SEQ ID NO: 158109 - RNA, 27 nt, Artificial Sequence
  Description of Artificial Sequence: Synthetic oligonucleotide
guuucauuucuucucuuuucuuaaggc

SEQ ID NO: 158110 - RNA, 27 nt, Artificial Sequence
  Description of Artificial Sequence: Synthetic oligonucleotide
ggaggauggaaacacacuccuucaguu

SEQ ID NO: 158111 - RNA, 27 nt, Artificial Sequence
  Description of Artificial Sequence: Synthetic oligonucleotide
ucaaagauuuucagucccgcggugaca

SEQ ID NO: 158112 - RNA, 27 nt, Artificial Sequence
  Description of Artificial Sequence: Synthetic oligonucleotide
ccugaacggcacgcuuauuucugcugu

SEQ ID NO: 158113 - RNA, 27 nt, Artificial Sequence
  Description of Artificial Sequence: Synthetic oligonucleotide
cuucuggacccugaacggcacgcuuau

SEQ ID NO: 158114 - RNA, 27 nt, Artificial Sequence
  Description of Artificial Sequence: Synthetic oligonucleotide
caagcagucuugagugacuguuucuuc

SEQ ID NO: 158115 - RNA, 27 nt, Artificial Sequence
  Description of Artificial Sequence: Synthetic oligonucleotide
ccaaagacauggaccuucuuccucuga

SEQ ID NO: 158116 - RNA, 27 nt, Artificial Sequence
  Description of Artificial Sequence: Synthetic oligonucleotide
guguuucaggcauauuuugaauacauc

SEQ ID NO: 158117 - RNA, 27 nt, Artificial Sequence
  Description of Artificial Sequence: Synthetic oligonucleotide
gagguacagagaaagggaggaaaauag

SEQ ID NO: 158118 - RNA, 27 nt, Artificial Sequence
  Description of Artificial Sequence: Synthetic oligonucleotide
ucuugucuugcucuaucuuucuuuggu

SEQ ID NO: 158119 - RNA, 27 nt, Artificial Sequence
  Description of Artificial Sequence: Synthetic oligonucleotide
uuucuugucuugcucuaucuuucuuug

SEQ ID NO: 158120 - RNA, 27 nt, Artificial Sequence
  Description of Artificial Sequence: Synthetic oligonucleotide
ggaucuuguacaaacaaaugcuuucuc

SEQ ID NO: 158121 - RNA, 27 nt, Artificial Sequence
  Description of Artificial Sequence: Synthetic oligonucleotide
ucugcaaguacguucguuuaacucaag

SEQ ID NO: 158122 - RNA, 27 nt, Artificial Sequence
  Description of Artificial Sequence: Synthetic oligonucleotide
ucuguaucgaucguucuguaucagucu

SEQ ID NO: 158123 - RNA, 27 nt, Artificial Sequence
  Description of Artificial Sequence: Synthetic oligonucleotide
auuuauuuuuauauauauauaauauau

SEQ ID NO: 158124 - RNA, 27 nt, Artificial Sequence
  Description of Artificial Sequence: Synthetic oligonucleotide
auauuuauuuuuauauauauauaauau

SEQ ID NO: 158125 - RNA, 27 nt, Artificial Sequence
  Description of Artificial Sequence: Synthetic oligonucleotide
cacagcagucaaauacauccagugaag

SEQ ID NO: 158126 - RNA, 27 nt, Artificial Sequence
  Description of Artificial Sequence: Synthetic oligonucleotide
gucucucaucuccuccucuucccuguc

SEQ ID NO: 158127 - RNA, 27 nt, Artificial Sequence
  Description of Artificial Sequence: Synthetic oligonucleotide
ccaagugggacaaaaaaaagaucaugc

SEQ ID NO: 158128 - RNA, 14 nt, Artificial Sequence
  Description of Artificial Sequence: Synthetic oligonucleotide
guauuuugaugagg

SEQ ID NO: 158129 - RNA, 12 nt, Artificial Sequence
  Description of Artificial Sequence: Synthetic oligonucleotide
ggcccagaugau

SEQ ID NO: 158130 - RNA, 14 nt, Artificial Sequence
  Description of Artificial Sequence: Synthetic oligonucleotide
gggaagaaaacuau

SEQ ID NO: 158131 - RNA, 15 nt, Artificial Sequence
  Description of Artificial Sequence: Synthetic oligonucleotide
guuuuaauuuauuuc

SEQ ID NO: 158132 - RNA, 12 nt, Artificial Sequence
  Description of Artificial Sequence: Synthetic oligonucleotide
acguagggaaau

SEQ ID NO: 158133 - RNA, 12 nt, Artificial Sequence
  Description of Artificial Sequence: Synthetic oligonucleotide
ccaggguuuacc

SEQ ID NO: 158134 - RNA, 11 nt, Artificial Sequence
  Description of Artificial Sequence: Synthetic oligonucleotide
agcaagguuua

SEQ ID NO: 158135 - RNA, 12 nt, Artificial Sequence
  Description of Artificial Sequence: Synthetic oligonucleotide
uguauuauguug

SEQ ID NO: 158136 - RNA, 15 nt, Artificial Sequence
  Description of Artificial Sequence: Synthetic oligonucleotide
uuuuaaucuuuguga

SEQ ID NO: 158137 - RNA, 14 nt, Artificial Sequence
  Description of Artificial Sequence: Synthetic oligonucleotide
uuaaucuuugugac

SEQ ID NO: 158138 - RNA, 13 nt, Artificial Sequence
  Description of Artificial Sequence: Synthetic oligonucleotide
gcugcuuaugucu

SEQ ID NO: 158139 - RNA, 14 nt, Artificial Sequence
  Description of Artificial Sequence: Synthetic oligonucleotide
aaguguuucagaag

SEQ ID NO: 158140 - RNA, 13 nt, Artificial Sequence
  Description of Artificial Sequence: Synthetic oligonucleotide
gaccaucaauaag

SEQ ID NO: 158141 - RNA, 13 nt, Artificial Sequence
  Description of Artificial Sequence: Synthetic oligonucleotide
ccaucaauaagga

SEQ ID NO: 158142 - RNA, 14 nt, Artificial Sequence
  Description of Artificial Sequence: Synthetic oligonucleotide
ucaauaaggaagaa

SEQ ID NO: 158143 - RNA, 14 nt, Artificial Sequence
  Description of Artificial Sequence: Synthetic oligonucleotide
aauaaggaagaagc

SEQ ID NO: 158144 - RNA, 13 nt, Artificial Sequence
  Description of Artificial Sequence: Synthetic oligonucleotide
aggaagaagcccu

SEQ ID NO: 158145 - RNA, 13 nt, Artificial Sequence
  Description of Artificial Sequence: Synthetic oligonucleotide
gcauaacuaaagg

SEQ ID NO: 158146 - RNA, 14 nt, Artificial Sequence
  Description of Artificial Sequence: Synthetic oligonucleotide
cauaacuaaaggug

SEQ ID NO: 158147 - RNA, 12 nt, Artificial Sequence
  Description of Artificial Sequence: Synthetic oligonucleotide
cuacaucacgcc

SEQ ID NO: 158148 - RNA, 12 nt, Artificial Sequence
  Description of Artificial Sequence: Synthetic oligonucleotide
acuggauuuaag

SEQ ID NO: 158149 - RNA, 12 nt, Artificial Sequence
  Description of Artificial Sequence: Synthetic oligonucleotide
cuggauuuaagc

SEQ ID NO: 158150 - RNA, 13 nt, Artificial Sequence
  Description of Artificial Sequence: Synthetic oligonucleotide
gauuuaagcagag

SEQ ID NO: 158151 - RNA, 13 nt, Artificial Sequence
  Description of Artificial Sequence: Synthetic oligonucleotide
auuuaagcagagu

SEQ ID NO: 158152 - RNA, 13 nt, Artificial Sequence
  Description of Artificial Sequence: Synthetic oligonucleotide
uuaagcagaguuc

SEQ ID NO: 158153 - RNA, 13 nt, Artificial Sequence
  Description of Artificial Sequence: Synthetic oligonucleotide
uaagcagaguuca

SEQ ID NO: 158154 - RNA, 14 nt, Artificial Sequence
  Description of Artificial Sequence: Synthetic oligonucleotide
agcagaguucaaaa

SEQ ID NO: 158155 - RNA, 12 nt, Artificial Sequence
  Description of Artificial Sequence: Synthetic oligonucleotide
cucagggucuga

SEQ ID NO: 158156 - RNA, 13 nt, Artificial Sequence
  Description of Artificial Sequence: Synthetic oligonucleotide
caagcaacuacau

SEQ ID NO: 158157 - RNA, 12 nt, Artificial Sequence
  Description of Artificial Sequence: Synthetic oligonucleotide
aucaauggcagc

SEQ ID NO: 158158 - RNA, 11 nt, Artificial Sequence
  Description of Artificial Sequence: Synthetic oligonucleotide
uuccagcccac

SEQ ID NO: 158159 - RNA, 12 nt, Artificial Sequence
  Description of Artificial Sequence: Synthetic oligonucleotide
cagcugagaaug

SEQ ID NO: 158160 - RNA, 13 nt, Artificial Sequence
  Description of Artificial Sequence: Synthetic oligonucleotide
aacguaucuccua

SEQ ID NO: 158161 - RNA, 14 nt, Artificial Sequence
  Description of Artificial Sequence: Synthetic oligonucleotide
ccuaaaauaauuuc

SEQ ID NO: 158162 - RNA, 13 nt, Artificial Sequence
  Description of Artificial Sequence: Synthetic oligonucleotide
uggaagauucagc

SEQ ID NO: 158163 - RNA, 12 nt, Artificial Sequence
  Description of Artificial Sequence: Synthetic oligonucleotide
uuaaacucuccu

SEQ ID NO: 158164 - RNA, 12 nt, Artificial Sequence
  Description of Artificial Sequence: Synthetic oligonucleotide
cagccuacaguu

SEQ ID NO: 158165 - RNA, 13 nt, Artificial Sequence
  Description of Artificial Sequence: Synthetic oligonucleotide
guuauguucaguc

SEQ ID NO: 158166 - RNA, 13 nt, Artificial Sequence
  Description of Artificial Sequence: Synthetic oligonucleotide
cacauacaaaaug

SEQ ID NO: 158167 - RNA, 9 nt, Artificial Sequence
  Description of Artificial Sequence: Synthetic oligonucleotide
uccuuuugc

SEQ ID NO: 158168 - RNA, 12 nt, Artificial Sequence
  Description of Artificial Sequence: Synthetic oligonucleotide
ugaccugugaag

SEQ ID NO: 158169 - RNA, 12 nt, Artificial Sequence
  Description of Artificial Sequence: Synthetic oligonucleotide
cuaucucacaca

SEQ ID NO: 158170 - RNA, 13 nt, Artificial Sequence
  Description of Artificial Sequence: Synthetic oligonucleotide
uguccucaauugu

SEQ ID NO: 158171 - RNA, 12 nt, Artificial Sequence
  Description of Artificial Sequence: Synthetic oligonucleotide
aaaccguagcug

SEQ ID NO: 158172 - RNA, 12 nt, Artificial Sequence
  Description of Artificial Sequence: Synthetic oligonucleotide
uagcuggcaagc

SEQ ID NO: 158173 - RNA, 14 nt, Artificial Sequence
  Description of Artificial Sequence: Synthetic oligonucleotide
uuguaugguuaaaa

SEQ ID NO: 158174 - RNA, 14 nt, Artificial Sequence
  Description of Artificial Sequence: Synthetic oligonucleotide
ugguuaaaagaugg

SEQ ID NO: 158175 - RNA, 13 nt, Artificial Sequence
  Description of Artificial Sequence: Synthetic oligonucleotide
cagggaauuauac

SEQ ID NO: 158176 - RNA, 12 nt, Artificial Sequence
  Description of Artificial Sequence: Synthetic oligonucleotide
acaaucuugcug

SEQ ID NO: 158177 - RNA, 13 nt, Artificial Sequence
  Description of Artificial Sequence: Synthetic oligonucleotide
ccaauaaugaaga

SEQ ID NO: 158178 - RNA, 13 nt, Artificial Sequence
  Description of Artificial Sequence: Synthetic oligonucleotide
acuuuggauguuc

SEQ ID NO: 158179 - RNA, 12 nt, Artificial Sequence
  Description of Artificial Sequence: Synthetic oligonucleotide
aaugcuuccacu

SEQ ID NO: 158180 - RNA, 11 nt, Artificial Sequence
  Description of Artificial Sequence: Synthetic oligonucleotide
gagaaaguuug

SEQ ID NO: 158181 - RNA, 11 nt, Artificial Sequence
  Description of Artificial Sequence: Synthetic oligonucleotide
aaagaacuacu

SEQ ID NO: 158182 - RNA, 12 nt, Artificial Sequence
  Description of Artificial Sequence: Synthetic oligonucleotide
uuagaaauacgg

SEQ ID NO: 158183 - RNA, 12 nt, Artificial Sequence
  Description of Artificial Sequence: Synthetic oligonucleotide
aacauggguaca

SEQ ID NO: 158184 - RNA, 14 nt, Artificial Sequence
  Description of Artificial Sequence: Synthetic oligonucleotide
aaagacacagaaga

SEQ ID NO: 158185 - RNA, 11 nt, Artificial Sequence
  Description of Artificial Sequence: Synthetic oligonucleotide
uaguagggagg

SEQ ID NO: 158186 - RNA, 12 nt, Artificial Sequence
  Description of Artificial Sequence: Synthetic oligonucleotide
gccuucugcagc

SEQ ID NO: 158187 - RNA, 10 nt, Artificial Sequence
  Description of Artificial Sequence: Synthetic oligonucleotide
ggucugguac

SEQ ID NO: 158188 - RNA, 12 nt, Artificial Sequence
  Description of Artificial Sequence: Synthetic oligonucleotide
cuaguccuuccg

SEQ ID NO: 158189 - RNA, 12 nt, Artificial Sequence
  Description of Artificial Sequence: Synthetic oligonucleotide
ccagugaauauu

SEQ ID NO: 158190 - RNA, 13 nt, Artificial Sequence
  Description of Artificial Sequence: Synthetic oligonucleotide
augaauucaaguu

SEQ ID NO: 158191 - RNA, 12 nt, Artificial Sequence
  Description of Artificial Sequence: Synthetic oligonucleotide
caggacacagau

SEQ ID NO: 158192 - RNA, 12 nt, Artificial Sequence
  Description of Artificial Sequence: Synthetic oligonucleotide
cucaaagcacag

SEQ ID NO: 158193 - RNA, 10 nt, Artificial Sequence
  Description of Artificial Sequence: Synthetic oligonucleotide
accacugcca

SEQ ID NO: 158194 - RNA, 13 nt, Artificial Sequence
  Description of Artificial Sequence: Synthetic oligonucleotide
gaaacuacuagug

SEQ ID NO: 158195 - RNA, 12 nt, Artificial Sequence
  Description of Artificial Sequence: Synthetic oligonucleotide
aagucggacagc

SEQ ID NO: 158196 - RNA, 13 nt, Artificial Sequence
  Description of Artificial Sequence: Synthetic oligonucleotide
gaaagcgaaaaau

SEQ ID NO: 158197 - RNA, 13 nt, Artificial Sequence
  Description of Artificial Sequence: Synthetic oligonucleotide
cccucugauuuag

SEQ ID NO: 158198 - RNA, 12 nt, Artificial Sequence
  Description of Artificial Sequence: Synthetic oligonucleotide
ugagcuauuuaa

SEQ ID NO: 158199 - RNA, 13 nt, Artificial Sequence
  Description of Artificial Sequence: Synthetic oligonucleotide
aaaaggugaaaaa

SEQ ID NO: 158200 - RNA, 14 nt, Artificial Sequence
  Description of Artificial Sequence: Synthetic oligonucleotide
gaaaaagcacuauu

SEQ ID NO: 158201 - RNA, 12 nt, Artificial Sequence
  Description of Artificial Sequence: Synthetic oligonucleotide
ggcugaaaagaa

SEQ ID NO: 158202 - RNA, 12 nt, Artificial Sequence
  Description of Artificial Sequence: Synthetic oligonucleotide
uaaacccuuaua

SEQ ID NO: 158203 - RNA, 13 nt, Artificial Sequence
  Description of Artificial Sequence: Synthetic oligonucleotide
cauacuauuagcc

SEQ ID NO: 158204 - RNA, 12 nt, Artificial Sequence
  Description of Artificial Sequence: Synthetic oligonucleotide
gacagaagcauu

SEQ ID NO: 158205 - RNA, 14 nt, Artificial Sequence
  Description of Artificial Sequence: Synthetic oligonucleotide
agagcaaauaagau

SEQ ID NO: 158206 - RNA, 14 nt, Artificial Sequence
  Description of Artificial Sequence: Synthetic oligonucleotide
ccaacauuuuucuc

SEQ ID NO: 158207 - RNA, 15 nt, Artificial Sequence
  Description of Artificial Sequence: Synthetic oligonucleotide
uuaaguaugagaaaa

SEQ ID NO: 158208 - RNA, 14 nt, Artificial Sequence
  Description of Artificial Sequence: Synthetic oligonucleotide
caggaauaaagaug

SEQ ID NO: 158209 - RNA, 13 nt, Artificial Sequence
  Description of Artificial Sequence: Synthetic oligonucleotide
aauuugaaugacc

SEQ ID NO: 158210 - RNA, 14 nt, Artificial Sequence
  Description of Artificial Sequence: Synthetic oligonucleotide
auguauaaagauag

SEQ ID NO: 158211 - RNA, 12 nt, Artificial Sequence
  Description of Artificial Sequence: Synthetic oligonucleotide
ggcuguaacuau

SEQ ID NO: 158212 - RNA, 11 nt, Artificial Sequence
  Description of Artificial Sequence: Synthetic oligonucleotide
ucugugaagug

SEQ ID NO: 158213 - RNA, 14 nt, Artificial Sequence
  Description of Artificial Sequence: Synthetic oligonucleotide
ccuuuaaggaaaug

SEQ ID NO: 158214 - RNA, 13 nt, Artificial Sequence
  Description of Artificial Sequence: Synthetic oligonucleotide
aaggauacaaaaa

SEQ ID NO: 158215 - RNA, 12 nt, Artificial Sequence
  Description of Artificial Sequence: Synthetic oligonucleotide
agaugcaauuug

SEQ ID NO: 158216 - RNA, 12 nt, Artificial Sequence
  Description of Artificial Sequence: Synthetic oligonucleotide
guucaaaacgaa

SEQ ID NO: 158217 - RNA, 11 nt, Artificial Sequence
  Description of Artificial Sequence: Synthetic oligonucleotide
gugaaaccuca

SEQ ID NO: 158218 - RNA, 13 nt, Artificial Sequence
  Description of Artificial Sequence: Synthetic oligonucleotide
acgaaagagaagc

SEQ ID NO: 158219 - RNA, 12 nt, Artificial Sequence
  Description of Artificial Sequence: Synthetic oligonucleotide
cuccacaagcgc

SEQ ID NO: 158220 - RNA, 14 nt, Artificial Sequence
  Description of Artificial Sequence: Synthetic oligonucleotide
gagaagauuccaaa

SEQ ID NO: 158221 - RNA, 13 nt, Artificial Sequence
  Description of Artificial Sequence: Synthetic oligonucleotide
aaucuggauucaa

SEQ ID NO: 158222 - RNA, 13 nt, Artificial Sequence
  Description of Artificial Sequence: Synthetic oligonucleotide
agaacagauuuga

SEQ ID NO: 158223 - RNA, 11 nt, Artificial Sequence
  Description of Artificial Sequence: Synthetic oligonucleotide
ccagagcugug

SEQ ID NO: 158224 - RNA, 12 nt, Artificial Sequence
  Description of Artificial Sequence: Synthetic oligonucleotide
ccucagauuguu

SEQ ID NO: 158225 - RNA, 12 nt, Artificial Sequence
  Description of Artificial Sequence: Synthetic oligonucleotide
cuauuuuaauua

SEQ ID NO: 158226 - RNA, 13 nt, Artificial Sequence
  Description of Artificial Sequence: Synthetic oligonucleotide
uuuaauuuauuaa

SEQ ID NO: 158227 - RNA, 12 nt, Artificial Sequence
  Description of Artificial Sequence: Synthetic oligonucleotide
augcaguuugaa

SEQ ID NO: 158228 - RNA, 11 nt, Artificial Sequence
  Description of Artificial Sequence: Synthetic oligonucleotide
caugcugcugg

SEQ ID NO: 158229 - RNA, 13 nt, Artificial Sequence
  Description of Artificial Sequence: Synthetic oligonucleotide
agaugugcauuuc

SEQ ID NO: 158230 - RNA, 12 nt, Artificial Sequence
  Description of Artificial Sequence: Synthetic oligonucleotide
ucaaaaccugug

SEQ ID NO: 158231 - RNA, 11 nt, Artificial Sequence
  Description of Artificial Sequence: Synthetic oligonucleotide
gaaugugggua

SEQ ID NO: 158232 - RNA, 10 nt, Artificial Sequence
  Description of Artificial Sequence: Synthetic oligonucleotide
auguggguag

SEQ ID NO: 158233 - RNA, 13 nt, Artificial Sequence
  Description of Artificial Sequence: Synthetic oligonucleotide
ugaaaaugagcau

SEQ ID NO: 158234 - RNA, 13 nt, Artificial Sequence
  Description of Artificial Sequence: Synthetic oligonucleotide
uugcuuuucaugu

SEQ ID NO: 158235 - RNA, 12 nt, Artificial Sequence
  Description of Artificial Sequence: Synthetic oligonucleotide
uguauuucuaua

SEQ ID NO: 158236 - RNA, 13 nt, Artificial Sequence
  Description of Artificial Sequence: Synthetic oligonucleotide
uuugauuaauguu

SEQ ID NO: 158237 - RNA, 12 nt, Artificial Sequence
  Description of Artificial Sequence: Synthetic oligonucleotide
caacguguauag

SEQ ID NO: 158238 - RNA, 12 nt, Artificial Sequence
  Description of Artificial Sequence: Synthetic oligonucleotide
cauauccuuggc

SEQ ID NO: 158239 - RNA, 13 nt, Artificial Sequence
  Description of Artificial Sequence: Synthetic oligonucleotide
uacuaacaucugg

SEQ ID NO: 158240 - RNA, 11 nt, Artificial Sequence
  Description of Artificial Sequence: Synthetic oligonucleotide
cauaaguugug

SEQ ID NO: 158241 - RNA, 12 nt, Artificial Sequence
  Description of Artificial Sequence: Synthetic oligonucleotide
gcaucauuuugg

SEQ ID NO: 158242 - RNA, 10 nt, Artificial Sequence
  Description of Artificial Sequence: Synthetic oligonucleotide
gcucuucuua

SEQ ID NO: 158243 - RNA, 10 nt, Artificial Sequence
  Description of Artificial Sequence: Synthetic oligonucleotide
agauuagguc

SEQ ID NO: 158244 - RNA, 12 nt, Artificial Sequence
  Description of Artificial Sequence: Synthetic oligonucleotide
auggaauugaaa

SEQ ID NO: 158245 - RNA, 13 nt, Artificial Sequence
  Description of Artificial Sequence: Synthetic oligonucleotide
cacacucauuccu

SEQ ID NO: 158246 - RNA, 12 nt, Artificial Sequence
  Description of Artificial Sequence: Synthetic oligonucleotide
uguagagguaac

SEQ ID NO: 158247 - RNA, 11 nt, Artificial Sequence
  Description of Artificial Sequence: Synthetic oligonucleotide
caaccacaugc

SEQ ID NO: 158248 - RNA, 12 nt, Artificial Sequence
  Description of Artificial Sequence: Synthetic oligonucleotide
ucggaaacaagu

SEQ ID NO: 158249 - RNA, 11 nt, Artificial Sequence
  Description of Artificial Sequence: Synthetic oligonucleotide
acucccaauaa

SEQ ID NO: 158250 - RNA, 13 nt, Artificial Sequence
  Description of Artificial Sequence: Synthetic oligonucleotide
aaugcuaagaaau

SEQ ID NO: 158251 - RNA, 11 nt, Artificial Sequence
  Description of Artificial Sequence: Synthetic oligonucleotide
gucuuucucua

SEQ ID NO: 158252 - RNA, 11 nt, Artificial Sequence
  Description of Artificial Sequence: Synthetic oligonucleotide
ugaauuucagg

SEQ ID NO: 158253 - RNA, 13 nt, Artificial Sequence
  Description of Artificial Sequence: Synthetic oligonucleotide
cgauucccucuca

SEQ ID NO: 158254 - RNA, 11 nt, Artificial Sequence
  Description of Artificial Sequence: Synthetic oligonucleotide
aggaaagugaa

SEQ ID NO: 158255 - RNA, 12 nt, Artificial Sequence
  Description of Artificial Sequence: Synthetic oligonucleotide
gaggcugcaugc

SEQ ID NO: 158256 - RNA, 11 nt, Artificial Sequence
  Description of Artificial Sequence: Synthetic oligonucleotide
ucucugaacag

SEQ ID NO: 158257 - RNA, 12 nt, Artificial Sequence
  Description of Artificial Sequence: Synthetic oligonucleotide
aacuuggcugua

SEQ ID NO: 158258 - RNA, 12 nt, Artificial Sequence
  Description of Artificial Sequence: Synthetic oligonucleotide
agaagccaaaau

SEQ ID NO: 158259 - RNA, 14 nt, Artificial Sequence
  Description of Artificial Sequence: Synthetic oligonucleotide
auuaaaagaagucc

SEQ ID NO: 158260 - RNA, 14 nt, Artificial Sequence
  Description of Artificial Sequence: Synthetic oligonucleotide
gaauccggauuauc

SEQ ID NO: 158261 - RNA, 12 nt, Artificial Sequence
  Description of Artificial Sequence: Synthetic oligonucleotide
aaugugacauca

SEQ ID NO: 158262 - RNA, 13 nt, Artificial Sequence
  Description of Artificial Sequence: Synthetic oligonucleotide
caucaaagcaagu

SEQ ID NO: 158263 - RNA, 11 nt, Artificial Sequence
  Description of Artificial Sequence: Synthetic oligonucleotide
agagagagaaa

SEQ ID NO: 158264 - RNA, 13 nt, Artificial Sequence
  Description of Artificial Sequence: Synthetic oligonucleotide
ucgcuguaguauu

SEQ ID NO: 158265 - RNA, 14 nt, Artificial Sequence
  Description of Artificial Sequence: Synthetic oligonucleotide
cgcuguaguauuua

SEQ ID NO: 158266 - RNA, 13 nt, Artificial Sequence
  Description of Artificial Sequence: Synthetic oligonucleotide
auuuaagcccaua

SEQ ID NO: 158267 - RNA, 15 nt, Artificial Sequence
  Description of Artificial Sequence: Synthetic oligonucleotide
auuaaaauaaacaug

SEQ ID NO: 158268 - RNA, 12 nt, Artificial Sequence
  Description of Artificial Sequence: Synthetic oligonucleotide
cuguucugaucg

SEQ ID NO: 158269 - RNA, 16 nt, Artificial Sequence
  Description of Artificial Sequence: Synthetic oligonucleotide
aaauaauuugaacuuu

SEQ ID NO: 158270 - RNA, 12 nt, Artificial Sequence
  Description of Artificial Sequence: Synthetic oligonucleotide
ugcgaccuuaau

SEQ ID NO: 158271 - RNA, 11 nt, Artificial Sequence
  Description of Artificial Sequence: Synthetic oligonucleotide
cugagaaagcu

SEQ ID NO: 158272 - RNA, 13 nt, Artificial Sequence
  Description of Artificial Sequence: Synthetic oligonucleotide
aguaaagaugcua

SEQ ID NO: 158273 - RNA, 12 nt, Artificial Sequence
  Description of Artificial Sequence: Synthetic oligonucleotide
cugcuuaauugc

SEQ ID NO: 158274 - RNA, 14 nt, Artificial Sequence
  Description of Artificial Sequence: Synthetic oligonucleotide
uaccauaugaauga

SEQ ID NO: 158275 - RNA, 12 nt, Artificial Sequence
  Description of Artificial Sequence: Synthetic oligonucleotide
aacuuucuuauc

SEQ ID NO: 158276 - RNA, 13 nt, Artificial Sequence
  Description of Artificial Sequence: Synthetic oligonucleotide
ccuugcaugacau

SEQ ID NO: 158277 - RNA, 14 nt, Artificial Sequence
  Description of Artificial Sequence: Synthetic oligonucleotide
ugaauuuguauaug

SEQ ID NO: 158278 - RNA, 12 nt, Artificial Sequence
  Description of Artificial Sequence: Synthetic oligonucleotide
gaauccuaguag

SEQ ID NO: 158279 - RNA, 10 nt, Artificial Sequence
  Description of Artificial Sequence: Synthetic oligonucleotide
gaaagggaag

SEQ ID NO: 158280 - RNA, 11 nt, Artificial Sequence
  Description of Artificial Sequence: Synthetic oligonucleotide
uaucggcaugc

SEQ ID NO: 158281 - RNA, 12 nt, Artificial Sequence
  Description of Artificial Sequence: Synthetic oligonucleotide
caccucauagua

SEQ ID NO: 158282 - RNA, 11 nt, Artificial Sequence
  Description of Artificial Sequence: Synthetic oligonucleotide
ccagaauugcc

SEQ ID NO: 158283 - RNA, 11 nt, Artificial Sequence
  Description of Artificial Sequence: Synthetic oligonucleotide
uggugaucugg

SEQ ID NO: 158284 - RNA, 12 nt, Artificial Sequence
  Description of Artificial Sequence: Synthetic oligonucleotide
gaucuggguaau

SEQ ID NO: 158285 - RNA, 12 nt, Artificial Sequence
  Description of Artificial Sequence: Synthetic oligonucleotide
ggaugugaugaa

SEQ ID NO: 158286 - RNA, 12 nt, Artificial Sequence
  Description of Artificial Sequence: Synthetic oligonucleotide
cauuuccacagc

SEQ ID NO: 158287 - RNA, 11 nt, Artificial Sequence
  Description of Artificial Sequence: Synthetic oligonucleotide
acagcuacacc

SEQ ID NO: 158288 - RNA, 12 nt, Artificial Sequence
  Description of Artificial Sequence: Synthetic oligonucleotide
ugcaguucuuac

SEQ ID NO: 158289 - RNA, 12 nt, Artificial Sequence
  Description of Artificial Sequence: Synthetic oligonucleotide
acgagaagaaga

SEQ ID NO: 158290 - RNA, 12 nt, Artificial Sequence
  Description of Artificial Sequence: Synthetic oligonucleotide
cgagaagaagau

SEQ ID NO: 158291 - RNA, 15 nt, Artificial Sequence
  Description of Artificial Sequence: Synthetic oligonucleotide
aagaagaucauuuac

SEQ ID NO: 158292 - RNA, 11 nt, Artificial Sequence
  Description of Artificial Sequence: Synthetic oligonucleotide
agaggaagagg

SEQ ID NO: 158293 - RNA, 12 nt, Artificial Sequence
  Description of Artificial Sequence: Synthetic oligonucleotide
gaggaagaggug

SEQ ID NO: 158294 - RNA, 13 nt, Artificial Sequence
  Description of Artificial Sequence: Synthetic oligonucleotide
cuacuuugagggc

SEQ ID NO: 158295 - RNA, 12 nt, Artificial Sequence
  Description of Artificial Sequence: Synthetic oligonucleotide
agggcaucuccu

SEQ ID NO: 158296 - RNA, 10 nt, Artificial Sequence
  Description of Artificial Sequence: Synthetic oligonucleotide
ggagugauau

SEQ ID NO: 158297 - RNA, 11 nt, Artificial Sequence
  Description of Artificial Sequence: Synthetic oligonucleotide
gagugauaugg

SEQ ID NO: 158298 - RNA, 12 nt, Artificial Sequence
  Description of Artificial Sequence: Synthetic oligonucleotide
ugcaguaaagau

SEQ ID NO: 158299 - RNA, 13 nt, Artificial Sequence
  Description of Artificial Sequence: Synthetic oligonucleotide
aguaaagauccua

SEQ ID NO: 158300 - RNA, 12 nt, Artificial Sequence
  Description of Artificial Sequence: Synthetic oligonucleotide
ugacaaaggaca

SEQ ID NO: 158301 - RNA, 13 nt, Artificial Sequence
  Description of Artificial Sequence: Synthetic oligonucleotide
gcaauugugaccc

SEQ ID NO: 158302 - RNA, 12 nt, Artificial Sequence
  Description of Artificial Sequence: Synthetic oligonucleotide
aacaucauccau

SEQ ID NO: 158303 - RNA, 12 nt, Artificial Sequence
  Description of Artificial Sequence: Synthetic oligonucleotide
ugaaauccaaca

SEQ ID NO: 158304 - RNA, 15 nt, Artificial Sequence
  Description of Artificial Sequence: Synthetic oligonucleotide
aacaauauauuucuc

SEQ ID NO: 158305 - RNA, 14 nt, Artificial Sequence
  Description of Artificial Sequence: Synthetic oligonucleotide
aacaguaaagucac

SEQ ID NO: 158306 - RNA, 14 nt, Artificial Sequence
  Description of Artificial Sequence: Synthetic oligonucleotide
ugugaagaaaguaa

SEQ ID NO: 158307 - RNA, 13 nt, Artificial Sequence
  Description of Artificial Sequence: Synthetic oligonucleotide
cuuccgagccauc

SEQ ID NO: 158308 - RNA, 12 nt, Artificial Sequence
  Description of Artificial Sequence: Synthetic oligonucleotide
aauggagguuga

SEQ ID NO: 158309 - RNA, 12 nt, Artificial Sequence
  Description of Artificial Sequence: Synthetic oligonucleotide
ggagguugaaua

SEQ ID NO: 158310 - RNA, 13 nt, Artificial Sequence
  Description of Artificial Sequence: Synthetic oligonucleotide
auuuugaguuuuc

SEQ ID NO: 158311 - RNA, 12 nt, Artificial Sequence
  Description of Artificial Sequence: Synthetic oligonucleotide
uauccuguuugu

SEQ ID NO: 158312 - RNA, 11 nt, Artificial Sequence
  Description of Artificial Sequence: Synthetic oligonucleotide
ccuguuuguuc

SEQ ID NO: 158313 - RNA, 10 nt, Artificial Sequence
  Description of Artificial Sequence: Synthetic oligonucleotide
cucuacagcc

SEQ ID NO: 158314 - RNA, 12 nt, Artificial Sequence
  Description of Artificial Sequence: Synthetic oligonucleotide
ucuuccauagcu

SEQ ID NO: 158315 - RNA, 12 nt, Artificial Sequence
  Description of Artificial Sequence: Synthetic oligonucleotide
auaaucuuccug

SEQ ID NO: 158316 - RNA, 12 nt, Artificial Sequence
  Description of Artificial Sequence: Synthetic oligonucleotide
uaaucuuccugu

SEQ ID NO: 158317 - RNA, 12 nt, Artificial Sequence
  Description of Artificial Sequence: Synthetic oligonucleotide
cuucaugacuug

SEQ ID NO: 158318 - RNA, 12 nt, Artificial Sequence
  Description of Artificial Sequence: Synthetic oligonucleotide
aagagggagaga

SEQ ID NO: 158319 - RNA, 12 nt, Artificial Sequence
  Description of Artificial Sequence: Synthetic oligonucleotide
cgucuccuacca

SEQ ID NO: 158320 - RNA, 12 nt, Artificial Sequence
  Description of Artificial Sequence: Synthetic oligonucleotide
gaucaaucggcc

SEQ ID NO: 158321 - RNA, 12 nt, Artificial Sequence
  Description of Artificial Sequence: Synthetic oligonucleotide
ggacgaacaucc

SEQ ID NO: 158322 - RNA, 11 nt, Artificial Sequence
  Description of Artificial Sequence: Synthetic oligonucleotide
agggucggaac

SEQ ID NO: 158323 - RNA, 10 nt, Artificial Sequence
  Description of Artificial Sequence: Synthetic oligonucleotide
ucggaaccca

SEQ ID NO: 158324 - RNA, 11 nt, Artificial Sequence
  Description of Artificial Sequence: Synthetic oligonucleotide
acccaagcuua

SEQ ID NO: 158325 - RNA, 14 nt, Artificial Sequence
  Description of Artificial Sequence: Synthetic oligonucleotide
gaacuuuaagcaac

SEQ ID NO: 158326 - RNA, 11 nt, Artificial Sequence
  Description of Artificial Sequence: Synthetic oligonucleotide
acuauucagug

SEQ ID NO: 158327 - RNA, 11 nt, Artificial Sequence
  Description of Artificial Sequence: Synthetic oligonucleotide
cuauucagugg

SEQ ID NO: 158328 - RNA, 13 nt, Artificial Sequence
  Description of Artificial Sequence: Synthetic oligonucleotide
aaacacagauaac

SEQ ID NO: 158329 - RNA, 12 nt, Artificial Sequence
  Description of Artificial Sequence: Synthetic oligonucleotide
cuuaagaaaaga

SEQ ID NO: 158330 - RNA, 12 nt, Artificial Sequence
  Description of Artificial Sequence: Synthetic oligonucleotide
cugaaggagugu

SEQ ID NO: 158331 - RNA, 10 nt, Artificial Sequence
  Description of Artificial Sequence: Synthetic oligonucleotide
ucaccgcggg

SEQ ID NO: 158332 - RNA, 14 nt, Artificial Sequence
  Description of Artificial Sequence: Synthetic oligonucleotide
agcagaaauaagcg

SEQ ID NO: 158333 - RNA, 12 nt, Artificial Sequence
  Description of Artificial Sequence: Synthetic oligonucleotide
aagcgugccguu

SEQ ID NO: 158334 - RNA, 12 nt, Artificial Sequence
  Description of Artificial Sequence: Synthetic oligonucleotide
agaaacagucac

SEQ ID NO: 158335 - RNA, 12 nt, Artificial Sequence
  Description of Artificial Sequence: Synthetic oligonucleotide
agaggaagaagg

SEQ ID NO: 158336 - RNA, 14 nt, Artificial Sequence
  Description of Artificial Sequence: Synthetic oligonucleotide
uguauucaaaauau

SEQ ID NO: 158337 - RNA, 13 nt, Artificial Sequence
  Description of Artificial Sequence: Synthetic oligonucleotide
auuuuccucccuu

SEQ ID NO: 158338 - RNA, 13 nt, Artificial Sequence
  Description of Artificial Sequence: Synthetic oligonucleotide
caaagaaagauag

SEQ ID NO: 158339 - RNA, 12 nt, Artificial Sequence
  Description of Artificial Sequence: Synthetic oligonucleotide
aagaaagauaga

SEQ ID NO: 158340 - RNA, 13 nt, Artificial Sequence
  Description of Artificial Sequence: Synthetic oligonucleotide
gaaagcauuuguu

SEQ ID NO: 158341 - RNA, 13 nt, Artificial Sequence
  Description of Artificial Sequence: Synthetic oligonucleotide
ugaguuaaacgaa

SEQ ID NO: 158342 - RNA, 12 nt, Artificial Sequence
  Description of Artificial Sequence: Synthetic oligonucleotide
acugauacagaa

SEQ ID NO: 158343 - RNA, 12 nt, Artificial Sequence
  Description of Artificial Sequence: Synthetic oligonucleotide
auauuauauaua

SEQ ID NO: 158344 - RNA, 12 nt, Artificial Sequence
  Description of Artificial Sequence: Synthetic oligonucleotide
auuauauauaua

SEQ ID NO: 158345 - RNA, 12 nt, Artificial Sequence
  Description of Artificial Sequence: Synthetic oligonucleotide
ucacuggaugua

SEQ ID NO: 158346 - RNA, 12 nt, Artificial Sequence
  Description of Artificial Sequence: Synthetic oligonucleotide
cagggaagagga

SEQ ID NO: 158347 - RNA, 15 nt, Artificial Sequence
  Description of Artificial Sequence: Synthetic oligonucleotide
augaucuuuuuuuug

SEQ ID NO: 158348 - RNA, 11 nt, Artificial Sequence
  Description of Artificial Sequence: Synthetic oligonucleotide
aguucacggcc

SEQ ID NO: 158349 - RNA, 13 nt, Artificial Sequence
  Description of Artificial Sequence: Synthetic oligonucleotide
caccaucacacca

SEQ ID NO: 158350 - RNA, 11 nt, Artificial Sequence
  Description of Artificial Sequence: Synthetic oligonucleotide
ccugcggguuu

SEQ ID NO: 158351 - RNA, 10 nt, Artificial Sequence
  Description of Artificial Sequence: Synthetic oligonucleotide
auccaguuug

SEQ ID NO: 158352 - RNA, 13 nt, Artificial Sequence
  Description of Artificial Sequence: Synthetic oligonucleotide
guuaaggacuucu

SEQ ID NO: 158353 - RNA, 13 nt, Artificial Sequence
  Description of Artificial Sequence: Synthetic oligonucleotide
cagugggacagag

SEQ ID NO: 158354 - RNA, 14 nt, Artificial Sequence
  Description of Artificial Sequence: Synthetic oligonucleotide
aauuuguuauugug

SEQ ID NO: 158355 - RNA, 13 nt, Artificial Sequence
  Description of Artificial Sequence: Synthetic oligonucleotide
uucaaaugcauuu

SEQ ID NO: 158356 - RNA, 10 nt, Artificial Sequence
  Description of Artificial Sequence: Synthetic oligonucleotide
caggaaagcc

SEQ ID NO: 158357 - RNA, 11 nt, Artificial Sequence
  Description of Artificial Sequence: Synthetic oligonucleotide
aggaaagcccu

SEQ ID NO: 158358 - RNA, 12 nt, Artificial Sequence
  Description of Artificial Sequence: Synthetic oligonucleotide
cccagcauggcc

SEQ ID NO: 158359 - RNA, 11 nt, Artificial Sequence
  Description of Artificial Sequence: Synthetic oligonucleotide
cuucucccuga

SEQ ID NO: 158360 - RNA, 12 nt, Artificial Sequence
  Description of Artificial Sequence: Synthetic oligonucleotide
gaagaagcccuu

SEQ ID NO: 158361 - RNA, 12 nt, Artificial Sequence
  Description of Artificial Sequence: Synthetic oligonucleotide
agaagcccuuca

SEQ ID NO: 158362 - RNA, 11 nt, Artificial Sequence
  Description of Artificial Sequence: Synthetic oligonucleotide
gcccuucagcg

SEQ ID NO: 158363 - RNA, 11 nt, Artificial Sequence
  Description of Artificial Sequence: Synthetic oligonucleotide
ccuucagcggc

SEQ ID NO: 158364 - RNA, 12 nt, Artificial Sequence
  Description of Artificial Sequence: Synthetic oligonucleotide
ucagcggccagu

SEQ ID NO: 158365 - RNA, 12 nt, Artificial Sequence
  Description of Artificial Sequence: Synthetic oligonucleotide
ugaaaagcuccg

SEQ ID NO: 158366 - RNA, 11 nt, Artificial Sequence
  Description of Artificial Sequence: Synthetic oligonucleotide
aaaagcuccgg

SEQ ID NO: 158367 - RNA, 13 nt, Artificial Sequence
  Description of Artificial Sequence: Synthetic oligonucleotide
agucaacagucug

SEQ ID NO: 158368 - RNA, 13 nt, Artificial Sequence
  Description of Artificial Sequence: Synthetic oligonucleotide
cagaguucaaaag

SEQ ID NO: 158369 - RNA, 13 nt, Artificial Sequence
  Description of Artificial Sequence: Synthetic oligonucleotide
agaguucaaaagc

SEQ ID NO: 158370 - RNA, 12 nt, Artificial Sequence
  Description of Artificial Sequence: Synthetic oligonucleotide
uucaaaagcccu

SEQ ID NO: 158371 - RNA, 12 nt, Artificial Sequence
  Description of Artificial Sequence: Synthetic oligonucleotide
ucaaaagcccuu

SEQ ID NO: 158372 - RNA, 12 nt, Artificial Sequence
  Description of Artificial Sequence: Synthetic oligonucleotide
aaaagcccuuca

SEQ ID NO: 158373 - RNA, 12 nt, Artificial Sequence
  Description of Artificial Sequence: Synthetic oligonucleotide
aaagcccuucag

SEQ ID NO: 158374 - RNA, 13 nt, Artificial Sequence
  Description of Artificial Sequence: Synthetic oligonucleotide
gugaagccgcucg

SEQ ID NO: 158375 - RNA, 12 nt, Artificial Sequence
  Description of Artificial Sequence: Synthetic oligonucleotide
cacgccagucaa

SEQ ID NO: 158376 - RNA, 13 nt, Artificial Sequence
  Description of Artificial Sequence: Synthetic oligonucleotide
uucuuggugcgug

SEQ ID NO: 158377 - RNA, 14 nt, Artificial Sequence
  Description of Artificial Sequence: Synthetic oligonucleotide
auuggauucaucag

SEQ ID NO: 158378 - RNA, 13 nt, Artificial Sequence
  Description of Artificial Sequence: Synthetic oligonucleotide
uggaauaccuaag

SEQ ID NO: 158379 - RNA, 12 nt, Artificial Sequence
  Description of Artificial Sequence: Synthetic oligonucleotide
auuugaggcuca

SEQ ID NO: 158380 - RNA, 11 nt, Artificial Sequence
  Description of Artificial Sequence: Synthetic oligonucleotide
ucuacaauugg

SEQ ID NO: 158381 - RNA, 12 nt, Artificial Sequence
  Description of Artificial Sequence: Synthetic oligonucleotide
uaguuaggagcc

SEQ ID NO: 158382 - RNA, 13 nt, Artificial Sequence
  Description of Artificial Sequence: Synthetic oligonucleotide
agucaauauccac

SEQ ID NO: 158383 - RNA, 13 nt, Artificial Sequence
  Description of Artificial Sequence: Synthetic oligonucleotide
auguucagucaca

SEQ ID NO: 158384 - RNA, 12 nt, Artificial Sequence
  Description of Artificial Sequence: Synthetic oligonucleotide
acacacacauac

SEQ ID NO: 158385 - RNA, 12 nt, Artificial Sequence
  Description of Artificial Sequence: Synthetic oligonucleotide
uuccuuuugcuu

SEQ ID NO: 158386 - RNA, 16 nt, Artificial Sequence
  Description of Artificial Sequence: Synthetic oligonucleotide
uuuuaaaguaauuuuu

SEQ ID NO: 158387 - RNA, 13 nt, Artificial Sequence
  Description of Artificial Sequence: Synthetic oligonucleotide
caacagucaaugg

SEQ ID NO: 158388 - RNA, 13 nt, Artificial Sequence
  Description of Artificial Sequence: Synthetic oligonucleotide
ucgacaaaccaau

SEQ ID NO: 158389 - RNA, 12 nt, Artificial Sequence
  Description of Artificial Sequence: Synthetic oligonucleotide
acugcuaccacu

SEQ ID NO: 158390 - RNA, 13 nt, Artificial Sequence
  Description of Artificial Sequence: Synthetic oligonucleotide
gcaagcggucuua

SEQ ID NO: 158391 - RNA, 13 nt, Artificial Sequence
  Description of Artificial Sequence: Synthetic oligonucleotide
ggucuuaccggcu

SEQ ID NO: 158392 - RNA, 11 nt, Artificial Sequence
  Description of Artificial Sequence: Synthetic oligonucleotide
gauggguuacc

SEQ ID NO: 158393 - RNA, 11 nt, Artificial Sequence
  Description of Artificial Sequence: Synthetic oligonucleotide
guuaccugcga

SEQ ID NO: 158394 - RNA, 12 nt, Artificial Sequence
  Description of Artificial Sequence: Synthetic oligonucleotide
aaucuugcugag

SEQ ID NO: 158395 - RNA, 13 nt, Artificial Sequence
  Description of Artificial Sequence: Synthetic oligonucleotide
agcauaaaacagu

SEQ ID NO: 158396 - RNA, 12 nt, Artificial Sequence
  Description of Artificial Sequence: Synthetic oligonucleotide
guccuuuauccu

SEQ ID NO: 158397 - RNA, 12 nt, Artificial Sequence
  Description of Artificial Sequence: Synthetic oligonucleotide
caacgcaaguug

SEQ ID NO: 158398 - RNA, 13 nt, Artificial Sequence
  Description of Artificial Sequence: Synthetic oligonucleotide
aaacugaaaccau

SEQ ID NO: 158399 - RNA, 14 nt, Artificial Sequence
  Description of Artificial Sequence: Synthetic oligonucleotide
acuuuguuaaauau

SEQ ID NO: 158400 - RNA, 14 nt, Artificial Sequence
  Description of Artificial Sequence: Synthetic oligonucleotide
guauauuaaaaguu

SEQ ID NO: 158401 - RNA, 13 nt, Artificial Sequence
  Description of Artificial Sequence: Synthetic oligonucleotide
guuuugacuuaac

SEQ ID NO: 158402 - RNA, 13 nt, Artificial Sequence
  Description of Artificial Sequence: Synthetic oligonucleotide
gcaaacucagcac

SEQ ID NO: 158403 - RNA, 11 nt, Artificial Sequence
  Description of Artificial Sequence: Synthetic oligonucleotide
ugcugaccuca

SEQ ID NO: 158404 - RNA, 14 nt, Artificial Sequence
  Description of Artificial Sequence: Synthetic oligonucleotide
uuuauucagaucgc

SEQ ID NO: 158405 - RNA, 13 nt, Artificial Sequence
  Description of Artificial Sequence: Synthetic oligonucleotide
aggguucugggau

SEQ ID NO: 158406 - RNA, 15 nt, Artificial Sequence
  Description of Artificial Sequence: Synthetic oligonucleotide
auauuggaaauuaug

SEQ ID NO: 158407 - RNA, 13 nt, Artificial Sequence
  Description of Artificial Sequence: Synthetic oligonucleotide
auggaagcacuag

SEQ ID NO: 158408 - RNA, 13 nt, Artificial Sequence
  Description of Artificial Sequence: Synthetic oligonucleotide
guuuuuaugugga

SEQ ID NO: 158409 - RNA, 12 nt, Artificial Sequence
  Description of Artificial Sequence: Synthetic oligonucleotide
ggaauugguaga

SEQ ID NO: 158410 - RNA, 13 nt, Artificial Sequence
  Description of Artificial Sequence: Synthetic oligonucleotide
uuagacuuggaga

SEQ ID NO: 158411 - RNA, 13 nt, Artificial Sequence
  Description of Artificial Sequence: Synthetic oligonucleotide
uuacaguauucca

SEQ ID NO: 158412 - RNA, 15 nt, Artificial Sequence
  Description of Artificial Sequence: Synthetic oligonucleotide
ccacugaugaauuaa

SEQ ID NO: 158413 - RNA, 12 nt, Artificial Sequence
  Description of Artificial Sequence: Synthetic oligonucleotide
ccacaucaucac

SEQ ID NO: 158414 - RNA, 13 nt, Artificial Sequence
  Description of Artificial Sequence: Synthetic oligonucleotide
cucaccaaacaga

SEQ ID NO: 158415 - RNA, 12 nt, Artificial Sequence
  Description of Artificial Sequence: Synthetic oligonucleotide
ggaacaugaugg

SEQ ID NO: 158416 - RNA, 12 nt, Artificial Sequence
  Description of Artificial Sequence: Synthetic oligonucleotide
cauguagacugc

SEQ ID NO: 158417 - RNA, 13 nt, Artificial Sequence
  Description of Artificial Sequence: Synthetic oligonucleotide
ggaucuauuuaug

SEQ ID NO: 158418 - RNA, 12 nt, Artificial Sequence
  Description of Artificial Sequence: Synthetic oligonucleotide
gcacuauuauca

SEQ ID NO: 158419 - RNA, 11 nt, Artificial Sequence
  Description of Artificial Sequence: Synthetic oligonucleotide
aucaguucugc

SEQ ID NO: 158420 - RNA, 13 nt, Artificial Sequence
  Description of Artificial Sequence: Synthetic oligonucleotide
agauuaaaccuac

SEQ ID NO: 158421 - RNA, 13 nt, Artificial Sequence
  Description of Artificial Sequence: Synthetic oligonucleotide
auaaaauccuucu

SEQ ID NO: 158422 - RNA, 12 nt, Artificial Sequence
  Description of Artificial Sequence: Synthetic oligonucleotide
aaugcuguagac

SEQ ID NO: 158423 - RNA, 13 nt, Artificial Sequence
  Description of Artificial Sequence: Synthetic oligonucleotide
uugauaggaauag

SEQ ID NO: 158424 - RNA, 11 nt, Artificial Sequence
  Description of Artificial Sequence: Synthetic oligonucleotide
aauggcccuga

SEQ ID NO: 158425 - RNA, 11 nt, Artificial Sequence
  Description of Artificial Sequence: Synthetic oligonucleotide
uuccucaagca

SEQ ID NO: 158426 - RNA, 10 nt, Artificial Sequence
  Description of Artificial Sequence: Synthetic oligonucleotide
guucagccca

SEQ ID NO: 158427 - RNA, 11 nt, Artificial Sequence
  Description of Artificial Sequence: Synthetic oligonucleotide
gcugcugaacc

SEQ ID NO: 158428 - RNA, 12 nt, Artificial Sequence
  Description of Artificial Sequence: Synthetic oligonucleotide
aaguucucuuca

SEQ ID NO: 158429 - RNA, 11 nt, Artificial Sequence
  Description of Artificial Sequence: Synthetic oligonucleotide
ccagccuagag

SEQ ID NO: 158430 - RNA, 13 nt, Artificial Sequence
  Description of Artificial Sequence: Synthetic oligonucleotide
cucugugaagugu

SEQ ID NO: 158431 - RNA, 14 nt, Artificial Sequence
  Description of Artificial Sequence: Synthetic oligonucleotide
ugagaaaauuucaa

SEQ ID NO: 158432 - RNA, 11 nt, Artificial Sequence
  Description of Artificial Sequence: Synthetic oligonucleotide
aauccuccuga

SEQ ID NO: 158433 - RNA, 12 nt, Artificial Sequence
  Description of Artificial Sequence: Synthetic oligonucleotide
gugacaucauau

SEQ ID NO: 158434 - RNA, 13 nt, Artificial Sequence
  Description of Artificial Sequence: Synthetic oligonucleotide
aaucuucaucaua

SEQ ID NO: 158435 - RNA, 13 nt, Artificial Sequence
  Description of Artificial Sequence: Synthetic oligonucleotide
gacuagcuauuaa

SEQ ID NO: 158436 - RNA, 14 nt, Artificial Sequence
  Description of Artificial Sequence: Synthetic oligonucleotide
ucucuacuaaaaau

SEQ ID NO: 158437 - RNA, 12 nt, Artificial Sequence
  Description of Artificial Sequence: Synthetic oligonucleotide
ucuaucucgccu

SEQ ID NO: 158438 - RNA, 13 nt, Artificial Sequence
  Description of Artificial Sequence: Synthetic oligonucleotide
cuucgguccaguu

SEQ ID NO: 158439 - RNA, 11 nt, Artificial Sequence
  Description of Artificial Sequence: Synthetic oligonucleotide
gauguagccgc

SEQ ID NO: 158440 - RNA, 12 nt, Artificial Sequence
  Description of Artificial Sequence: Synthetic oligonucleotide
ugaggagacuug

SEQ ID NO: 158441 - RNA, 12 nt, Artificial Sequence
  Description of Artificial Sequence: Synthetic oligonucleotide
gaguagugagga

SEQ ID NO: 158442 - RNA, 14 nt, Artificial Sequence
  Description of Artificial Sequence: Synthetic oligonucleotide
cagaugaguacaaa

SEQ ID NO: 158443 - RNA, 13 nt, Artificial Sequence
  Description of Artificial Sequence: Synthetic oligonucleotide
guuguuaaugggc

SEQ ID NO: 158444 - RNA, 13 nt, Artificial Sequence
  Description of Artificial Sequence: Synthetic oligonucleotide
uuuuuaauuuauu

SEQ ID NO: 158445 - RNA, 12 nt, Artificial Sequence
  Description of Artificial Sequence: Synthetic oligonucleotide
uauuuaaauaug

SEQ ID NO: 158446 - RNA, 13 nt, Artificial Sequence
  Description of Artificial Sequence: Synthetic oligonucleotide
uauccuuuguuuc

SEQ ID NO: 158447 - RNA, 14 nt, Artificial Sequence
  Description of Artificial Sequence: Synthetic oligonucleotide
cgucuaaguguuug

SEQ ID NO: 158448 - RNA, 12 nt, Artificial Sequence
  Description of Artificial Sequence: Synthetic oligonucleotide
accugugacaaa

SEQ ID NO: 158449 - RNA, 13 nt, Artificial Sequence
  Description of Artificial Sequence: Synthetic oligonucleotide
ccaggcugaauua

SEQ ID NO: 158450 - RNA, 14 nt, Artificial Sequence
  Description of Artificial Sequence: Synthetic oligonucleotide
gucauucuuacaau

SEQ ID NO: 158451 - RNA, 15 nt, Artificial Sequence
  Description of Artificial Sequence: Synthetic oligonucleotide
ucauucuuacaauug

SEQ ID NO: 158452 - RNA, 12 nt, Artificial Sequence
  Description of Artificial Sequence: Synthetic oligonucleotide
cagagaguguac

SEQ ID NO: 158453 - RNA, 12 nt, Artificial Sequence
  Description of Artificial Sequence: Synthetic oligonucleotide
agaacucagcag

SEQ ID NO: 158454 - RNA, 13 nt, Artificial Sequence
  Description of Artificial Sequence: Synthetic oligonucleotide
uuuauuuucagua

SEQ ID NO: 158455 - RNA, 12 nt, Artificial Sequence
  Description of Artificial Sequence: Synthetic oligonucleotide
ucuuaaauggaa

SEQ ID NO: 158456 - RNA, 13 nt, Artificial Sequence
  Description of Artificial Sequence: Synthetic oligonucleotide
ugccuaaaauugu

SEQ ID NO: 158457 - RNA, 12 nt, Artificial Sequence
  Description of Artificial Sequence: Synthetic oligonucleotide
agacugugagcu

SEQ ID NO: 158458 - RNA, 14 nt, Artificial Sequence
  Description of Artificial Sequence: Synthetic oligonucleotide
ugcuuuuuauuaau

SEQ ID NO: 158459 - RNA, 13 nt, Artificial Sequence
  Description of Artificial Sequence: Synthetic oligonucleotide
cucuucuuacauu

SEQ ID NO: 158460 - RNA, 15 nt, Artificial Sequence
  Description of Artificial Sequence: Synthetic oligonucleotide
cauuuguaaaaaugu

SEQ ID NO: 158461 - RNA, 15 nt, Artificial Sequence
  Description of Artificial Sequence: Synthetic oligonucleotide
aucuuaauucauauu

SEQ ID NO: 158462 - RNA, 13 nt, Artificial Sequence
  Description of Artificial Sequence: Synthetic oligonucleotide
gaacuaaucauga

SEQ ID NO: 158463 - RNA, 12 nt, Artificial Sequence
  Description of Artificial Sequence: Synthetic oligonucleotide
ucugcucuuggg

SEQ ID NO: 158464 - RNA, 13 nt, Artificial Sequence
  Description of Artificial Sequence: Synthetic oligonucleotide
caguagcuuugag

SEQ ID NO: 158465 - RNA, 14 nt, Artificial Sequence
  Description of Artificial Sequence: Synthetic oligonucleotide
cacguaauauuuca

SEQ ID NO: 158466 - RNA, 13 nt, Artificial Sequence
  Description of Artificial Sequence: Synthetic oligonucleotide
uauucucuucacu

SEQ ID NO: 158467 - RNA, 14 nt, Artificial Sequence
  Description of Artificial Sequence: Synthetic oligonucleotide
cuaaugcuaagaaa

SEQ ID NO: 158468 - RNA, 12 nt, Artificial Sequence
  Description of Artificial Sequence: Synthetic oligonucleotide
gcugaaaaucaa

SEQ ID NO: 158469 - RNA, 14 nt, Artificial Sequence
  Description of Artificial Sequence: Synthetic oligonucleotide
aauaugauuacuuu

SEQ ID NO: 158470 - RNA, 14 nt, Artificial Sequence
  Description of Artificial Sequence: Synthetic oligonucleotide
cauuuuguucuaca

SEQ ID NO: 158471 - RNA, 12 nt, Artificial Sequence
  Description of Artificial Sequence: Synthetic oligonucleotide
cccgggacucuc

SEQ ID NO: 158472 - RNA, 14 nt, Artificial Sequence
  Description of Artificial Sequence: Synthetic oligonucleotide
ccuuuaaaguaaag

SEQ ID NO: 158473 - RNA, 13 nt, Artificial Sequence
  Description of Artificial Sequence: Synthetic oligonucleotide
ucuggaagccugg

SEQ ID NO: 158474 - RNA, 14 nt, Artificial Sequence
  Description of Artificial Sequence: Synthetic oligonucleotide
aaaacaaaagagag

SEQ ID NO: 158475 - RNA, 13 nt, Artificial Sequence
  Description of Artificial Sequence: Synthetic oligonucleotide
aucaguuaugccg

SEQ ID NO: 158476 - RNA, 13 nt, Artificial Sequence
  Description of Artificial Sequence: Synthetic oligonucleotide
uaaaagaagucca

SEQ ID NO: 158477 - RNA, 11 nt, Artificial Sequence
  Description of Artificial Sequence: Synthetic oligonucleotide
aggugagguua

SEQ ID NO: 158478 - RNA, 11 nt, Artificial Sequence
  Description of Artificial Sequence: Synthetic oligonucleotide
gggaagaggac

SEQ ID NO: 158479 - RNA, 13 nt, Artificial Sequence
  Description of Artificial Sequence: Synthetic oligonucleotide
aagcaaguauugu

SEQ ID NO: 158480 - RNA, 12 nt, Artificial Sequence
  Description of Artificial Sequence: Synthetic oligonucleotide
auuguagcacuc

SEQ ID NO: 158481 - RNA, 14 nt, Artificial Sequence
  Description of Artificial Sequence: Synthetic oligonucleotide
acaaaaccacaaau

SEQ ID NO: 158482 - RNA, 12 nt, Artificial Sequence
  Description of Artificial Sequence: Synthetic oligonucleotide
uaagcccauaca

SEQ ID NO: 158483 - RNA, 11 nt, Artificial Sequence
  Description of Artificial Sequence: Synthetic oligonucleotide
agcccauacag

SEQ ID NO: 158484 - RNA, 12 nt, Artificial Sequence
  Description of Artificial Sequence: Synthetic oligonucleotide
cagaaaccuucc

SEQ ID NO: 158485 - RNA, 10 nt, Artificial Sequence
  Description of Artificial Sequence: Synthetic oligonucleotide
guauaccuac

SEQ ID NO: 158486 - RNA, 13 nt, Artificial Sequence
  Description of Artificial Sequence: Synthetic oligonucleotide
gccaguuuucgga

SEQ ID NO: 158487 - RNA, 9 nt, Artificial Sequence
  Description of Artificial Sequence: Synthetic oligonucleotide
ggaacaggg

SEQ ID NO: 158488 - RNA, 13 nt, Artificial Sequence
  Description of Artificial Sequence: Synthetic oligonucleotide
uuaacuuuccagu

SEQ ID NO: 158489 - RNA, 14 nt, Artificial Sequence
  Description of Artificial Sequence: Synthetic oligonucleotide
aaaguuugguuuug

SEQ ID NO: 158490 - RNA, 12 nt, Artificial Sequence
  Description of Artificial Sequence: Synthetic oligonucleotide
cuucccacugua

SEQ ID NO: 158491 - RNA, 13 nt, Artificial Sequence
  Description of Artificial Sequence: Synthetic oligonucleotide
ugauaccauauga

SEQ ID NO: 158492 - RNA, 11 nt, Artificial Sequence
  Description of Artificial Sequence: Synthetic oligonucleotide
aacaugggcug

SEQ ID NO: 158493 - RNA, 13 nt, Artificial Sequence
  Description of Artificial Sequence: Synthetic oligonucleotide
caacuuuuucaua

SEQ ID NO: 158494 - RNA, 12 nt, Artificial Sequence
  Description of Artificial Sequence: Synthetic oligonucleotide
caugaggccgga

SEQ ID NO: 158495 - RNA, 11 nt, Artificial Sequence
  Description of Artificial Sequence: Synthetic oligonucleotide
acugcauuugu

SEQ ID NO: 158496 - RNA, 13 nt, Artificial Sequence
  Description of Artificial Sequence: Synthetic oligonucleotide
aauguuuacuacc

SEQ ID NO: 158497 - RNA, 15 nt, Artificial Sequence
  Description of Artificial Sequence: Synthetic oligonucleotide
aauuuuuugaugaaa

SEQ ID NO: 158498 - RNA, 14 nt, Artificial Sequence
  Description of Artificial Sequence: Synthetic oligonucleotide
cagugugugaauuu

SEQ ID NO: 158499 - RNA, 13 nt, Artificial Sequence
  Description of Artificial Sequence: Synthetic oligonucleotide
gagcaauguaugu

SEQ ID NO: 158500 - RNA, 14 nt, Artificial Sequence
  Description of Artificial Sequence: Synthetic oligonucleotide
aaagcacauauaua

SEQ ID NO: 158501 - RNA, 14 nt, Artificial Sequence
  Description of Artificial Sequence: Synthetic oligonucleotide
guaauaguuucucc

SEQ ID NO: 158502 - RNA, 13 nt, Artificial Sequence
  Description of Artificial Sequence: Synthetic oligonucleotide
aguuucuccaaau

SEQ ID NO: 158503 - RNA, 13 nt, Artificial Sequence
  Description of Artificial Sequence: Synthetic oligonucleotide
uacuuccuagaaa

SEQ ID NO: 158504 - RNA, 13 nt, Artificial Sequence
  Description of Artificial Sequence: Synthetic oligonucleotide
uacaccauauaug

SEQ ID NO: 158505 - RNA, 14 nt, Artificial Sequence
  Description of Artificial Sequence: Synthetic oligonucleotide
auauaugaauggag

SEQ ID NO: 158506 - RNA, 13 nt, Artificial Sequence
  Description of Artificial Sequence: Synthetic oligonucleotide
acgagaagaagau

SEQ ID NO: 158507 - RNA, 13 nt, Artificial Sequence
  Description of Artificial Sequence: Synthetic oligonucleotide
ucauuuacaggga

SEQ ID NO: 158508 - RNA, 13 nt, Artificial Sequence
  Description of Artificial Sequence: Synthetic oligonucleotide
cauuuacagggac

SEQ ID NO: 158509 - RNA, 10 nt, Artificial Sequence
  Description of Artificial Sequence: Synthetic oligonucleotide
agggaccuga

SEQ ID NO: 158510 - RNA, 14 nt, Artificial Sequence
  Description of Artificial Sequence: Synthetic oligonucleotide
uguuugacugcauc

SEQ ID NO: 158511 - RNA, 13 nt, Artificial Sequence
  Description of Artificial Sequence: Synthetic oligonucleotide
uuugacugcaucg

SEQ ID NO: 158512 - RNA, 12 nt, Artificial Sequence
  Description of Artificial Sequence: Synthetic oligonucleotide
gaguucacaggg

SEQ ID NO: 158513 - RNA, 13 nt, Artificial Sequence
  Description of Artificial Sequence: Synthetic oligonucleotide
ggcaccucugucc

SEQ ID NO: 158514 - RNA, 15 nt, Artificial Sequence
  Description of Artificial Sequence: Synthetic oligonucleotide
gguuugucuuuuuaa

SEQ ID NO: 158515 - RNA, 14 nt, Artificial Sequence
  Description of Artificial Sequence: Synthetic oligonucleotide
uuugucuuuuuaag

SEQ ID NO: 158516 - RNA, 13 nt, Artificial Sequence
  Description of Artificial Sequence: Synthetic oligonucleotide
ccuaaagguuguc

SEQ ID NO: 158517 - RNA, 12 nt, Artificial Sequence
  Description of Artificial Sequence: Synthetic oligonucleotide
aagguugucgac

SEQ ID NO: 158518 - RNA, 13 nt, Artificial Sequence
  Description of Artificial Sequence: Synthetic oligonucleotide
accuggcaauugu

SEQ ID NO: 158519 - RNA, 12 nt, Artificial Sequence
  Description of Artificial Sequence: Synthetic oligonucleotide
aguggugcgagg

SEQ ID NO: 158520 - RNA, 13 nt, Artificial Sequence
  Description of Artificial Sequence: Synthetic oligonucleotide
agagacaugaaau

SEQ ID NO: 158521 - RNA, 13 nt, Artificial Sequence
  Description of Artificial Sequence: Synthetic oligonucleotide
auauauuucucca

SEQ ID NO: 158522 - RNA, 10 nt, Artificial Sequence
  Description of Artificial Sequence: Synthetic oligonucleotide
caugaaggcu

SEQ ID NO: 158523 - RNA, 11 nt, Artificial Sequence
  Description of Artificial Sequence: Synthetic oligonucleotide
gcuggaguggu

SEQ ID NO: 158524 - RNA, 11 nt, Artificial Sequence
  Description of Artificial Sequence: Synthetic oligonucleotide
aggaagagagg

SEQ ID NO: 158525 - RNA, 12 nt, Artificial Sequence
  Description of Artificial Sequence: Synthetic oligonucleotide
cuugcaucgggc

SEQ ID NO: 158526 - RNA, 13 nt, Artificial Sequence
  Description of Artificial Sequence: Synthetic oligonucleotide
auauccuacugug

SEQ ID NO: 158527 - RNA, 13 nt, Artificial Sequence
  Description of Artificial Sequence: Synthetic oligonucleotide
uccuacuguguaa

SEQ ID NO: 158528 - RNA, 12 nt, Artificial Sequence
  Description of Artificial Sequence: Synthetic oligonucleotide
ccuuguagugua

SEQ ID NO: 158529 - RNA, 13 nt, Artificial Sequence
  Description of Artificial Sequence: Synthetic oligonucleotide
ucuuuguugauug

SEQ ID NO: 158530 - RNA, 14 nt, Artificial Sequence
  Description of Artificial Sequence: Synthetic oligonucleotide
uuuguugauugaaa

SEQ ID NO: 158531 - RNA, 15 nt, Artificial Sequence
  Description of Artificial Sequence: Synthetic oligonucleotide
uucuuuuucuuccau

SEQ ID NO: 158532 - RNA, 13 nt, Artificial Sequence
  Description of Artificial Sequence: Synthetic oligonucleotide
aaucuuccuucua

SEQ ID NO: 158533 - RNA, 13 nt, Artificial Sequence
  Description of Artificial Sequence: Synthetic oligonucleotide
uugaaugcuucau

SEQ ID NO: 158534 - RNA, 13 nt, Artificial Sequence
  Description of Artificial Sequence: Synthetic oligonucleotide
ugaaugcuucaug

SEQ ID NO: 158535 - RNA, 13 nt, Artificial Sequence
  Description of Artificial Sequence: Synthetic oligonucleotide
aauucuacuuuga

SEQ ID NO: 158536 - RNA, 13 nt, Artificial Sequence
  Description of Artificial Sequence: Synthetic oligonucleotide
agcaacuacagac

SEQ ID NO: 158537 - RNA, 13 nt, Artificial Sequence
  Description of Artificial Sequence: Synthetic oligonucleotide
gaccaaggucaac

SEQ ID NO: 158538 - RNA, 13 nt, Artificial Sequence
  Description of Artificial Sequence: Synthetic oligonucleotide
cgacuaucucgac

SEQ ID NO: 158539 - RNA, 13 nt, Artificial Sequence
  Description of Artificial Sequence: Synthetic oligonucleotide
aaccuucccaaac

SEQ ID NO: 158540 - RNA, 14 nt, Artificial Sequence
  Description of Artificial Sequence: Synthetic oligonucleotide
ccaagcuuagaacu

SEQ ID NO: 158541 - RNA, 15 nt, Artificial Sequence
  Description of Artificial Sequence: Synthetic oligonucleotide
agcuuagaacuuuaa

SEQ ID NO: 158542 - RNA, 11 nt, Artificial Sequence
  Description of Artificial Sequence: Synthetic oligonucleotide
aagaccaccac

SEQ ID NO: 158543 - RNA, 14 nt, Artificial Sequence
  Description of Artificial Sequence: Synthetic oligonucleotide
gcgagaaauaaagu

SEQ ID NO: 158544 - RNA, 14 nt, Artificial Sequence
  Description of Artificial Sequence: Synthetic oligonucleotide
cgagaaauaaaguu

SEQ ID NO: 158545 - RNA, 12 nt, Artificial Sequence
  Description of Artificial Sequence: Synthetic oligonucleotide
aggaaaugaucc

SEQ ID NO: 158546 - RNA, 13 nt, Artificial Sequence
  Description of Artificial Sequence: Synthetic oligonucleotide
gaagaaaugaaac

SEQ ID NO: 158547 - RNA, 13 nt, Artificial Sequence
  Description of Artificial Sequence: Synthetic oligonucleotide
guuuccauccucc

SEQ ID NO: 158548 - RNA, 15 nt, Artificial Sequence
  Description of Artificial Sequence: Synthetic oligonucleotide
acugaaaaucuuuga

SEQ ID NO: 158549 - RNA, 11 nt, Artificial Sequence
  Description of Artificial Sequence: Synthetic oligonucleotide
ugccguucagg

SEQ ID NO: 158550 - RNA, 13 nt, Artificial Sequence
  Description of Artificial Sequence: Synthetic oligonucleotide
caggguccagaag

SEQ ID NO: 158551 - RNA, 13 nt, Artificial Sequence
  Description of Artificial Sequence: Synthetic oligonucleotide
ucaagacugcuug

SEQ ID NO: 158552 - RNA, 13 nt, Artificial Sequence
  Description of Artificial Sequence: Synthetic oligonucleotide
uccaugucuuugg

SEQ ID NO: 158553 - RNA, 11 nt, Artificial Sequence
  Description of Artificial Sequence: Synthetic oligonucleotide
gccugaaacac

SEQ ID NO: 158554 - RNA, 12 nt, Artificial Sequence
  Description of Artificial Sequence: Synthetic oligonucleotide
ucucuguaccuc

SEQ ID NO: 158555 - RNA, 12 nt, Artificial Sequence
  Description of Artificial Sequence: Synthetic oligonucleotide
agcaagacaaga

SEQ ID NO: 158556 - RNA, 13 nt, Artificial Sequence
  Description of Artificial Sequence: Synthetic oligonucleotide
gcaagacaagaaa

SEQ ID NO: 158557 - RNA, 12 nt, Artificial Sequence
  Description of Artificial Sequence: Synthetic oligonucleotide
uguacaagaucc

SEQ ID NO: 158558 - RNA, 12 nt, Artificial Sequence
  Description of Artificial Sequence: Synthetic oligonucleotide
cguacuugcaga

SEQ ID NO: 158559 - RNA, 13 nt, Artificial Sequence
  Description of Artificial Sequence: Synthetic oligonucleotide
cgaucgauacaga

SEQ ID NO: 158560 - RNA, 13 nt, Artificial Sequence
  Description of Artificial Sequence: Synthetic oligonucleotide
uauaaaaauaaau

SEQ ID NO: 158561 - RNA, 13 nt, Artificial Sequence
  Description of Artificial Sequence: Synthetic oligonucleotide
uaaaaauaaauau

SEQ ID NO: 158562 - RNA, 13 nt, Artificial Sequence
  Description of Artificial Sequence: Synthetic oligonucleotide
uuugacugcugug

SEQ ID NO: 158563 - RNA, 13 nt, Artificial Sequence
  Description of Artificial Sequence: Synthetic oligonucleotide
ggagaugagagac

SEQ ID NO: 158564 - RNA, 10 nt, Artificial Sequence
  Description of Artificial Sequence: Synthetic oligonucleotide
ucccacuugg

SEQ ID NO: 158565 - RNA, 10 nt, Artificial Sequence
  Description of Artificial Sequence: Synthetic oligonucleotide
guucacggcc

SEQ ID NO: 158566 - RNA, 12 nt, Artificial Sequence
  Description of Artificial Sequence: Synthetic oligonucleotide
accaucacacca

SEQ ID NO: 158567 - RNA, 10 nt, Artificial Sequence
  Description of Artificial Sequence: Synthetic oligonucleotide
cugcggguuu

SEQ ID NO: 158568 - RNA, 9 nt, Artificial Sequence
  Description of Artificial Sequence: Synthetic oligonucleotide
uccaguuug

SEQ ID NO: 158569 - RNA, 12 nt, Artificial Sequence
  Description of Artificial Sequence: Synthetic oligonucleotide
uuaaggacuucu

SEQ ID NO: 158570 - RNA, 12 nt, Artificial Sequence
  Description of Artificial Sequence: Synthetic oligonucleotide
agugggacagag

SEQ ID NO: 158571 - RNA, 13 nt, Artificial Sequence
  Description of Artificial Sequence: Synthetic oligonucleotide
auuuguuauugug

SEQ ID NO: 158572 - RNA, 12 nt, Artificial Sequence
  Description of Artificial Sequence: Synthetic oligonucleotide
ucaaaugcauuu

SEQ ID NO: 158573 - RNA, 9 nt, Artificial Sequence
  Description of Artificial Sequence: Synthetic oligonucleotide
aggaaagcc

SEQ ID NO: 158574 - RNA, 10 nt, Artificial Sequence
  Description of Artificial Sequence: Synthetic oligonucleotide
ggaaagcccu

SEQ ID NO: 158575 - RNA, 11 nt, Artificial Sequence
  Description of Artificial Sequence: Synthetic oligonucleotide
ccagcauggcc

SEQ ID NO: 158576 - RNA, 10 nt, Artificial Sequence
  Description of Artificial Sequence: Synthetic oligonucleotide
uucucccuga

SEQ ID NO: 158577 - RNA, 11 nt, Artificial Sequence
  Description of Artificial Sequence: Synthetic oligonucleotide
aagaagcccuu

SEQ ID NO: 158578 - RNA, 11 nt, Artificial Sequence
  Description of Artificial Sequence: Synthetic oligonucleotide
gaagcccuuca

SEQ ID NO: 158579 - RNA, 10 nt, Artificial Sequence
  Description of Artificial Sequence: Synthetic oligonucleotide
cccuucagcg

SEQ ID NO: 158580 - RNA, 10 nt, Artificial Sequence
  Description of Artificial Sequence: Synthetic oligonucleotide
cuucagcggc

SEQ ID NO: 158581 - RNA, 11 nt, Artificial Sequence
  Description of Artificial Sequence: Synthetic oligonucleotide
cagcggccagu

SEQ ID NO: 158582 - RNA, 11 nt, Artificial Sequence
  Description of Artificial Sequence: Synthetic oligonucleotide
gaaaagcuccg

SEQ ID NO: 158583 - RNA, 10 nt, Artificial Sequence
  Description of Artificial Sequence: Synthetic oligonucleotide
aaagcuccgg

SEQ ID NO: 158584 - RNA, 12 nt, Artificial Sequence
  Description of Artificial Sequence: Synthetic oligonucleotide
gucaacagucug

SEQ ID NO: 158585 - RNA, 12 nt, Artificial Sequence
  Description of Artificial Sequence: Synthetic oligonucleotide
agaguucaaaag

SEQ ID NO: 158586 - RNA, 12 nt, Artificial Sequence
  Description of Artificial Sequence: Synthetic oligonucleotide
gaguucaaaagc

SEQ ID NO: 158587 - RNA, 11 nt, Artificial Sequence
  Description of Artificial Sequence: Synthetic oligonucleotide
ucaaaagcccu

SEQ ID NO: 158588 - RNA, 11 nt, Artificial Sequence
  Description of Artificial Sequence: Synthetic oligonucleotide
caaaagcccuu

SEQ ID NO: 158589 - RNA, 11 nt, Artificial Sequence
  Description of Artificial Sequence: Synthetic oligonucleotide
aaagcccuuca

SEQ ID NO: 158590 - RNA, 11 nt, Artificial Sequence
  Description of Artificial Sequence: Synthetic oligonucleotide
aagcccuucag

SEQ ID NO: 158591 - RNA, 12 nt, Artificial Sequence
  Description of Artificial Sequence: Synthetic oligonucleotide
ugaagccgcucg

SEQ ID NO: 158592 - RNA, 11 nt, Artificial Sequence
  Description of Artificial Sequence: Synthetic oligonucleotide
acgccagucaa

SEQ ID NO: 158593 - RNA, 12 nt, Artificial Sequence
  Description of Artificial Sequence: Synthetic oligonucleotide
ucuuggugcgug

SEQ ID NO: 158594 - RNA, 13 nt, Artificial Sequence
  Description of Artificial Sequence: Synthetic oligonucleotide
uuggauucaucag

SEQ ID NO: 158595 - RNA, 12 nt, Artificial Sequence
  Description of Artificial Sequence: Synthetic oligonucleotide
ggaauaccuaag

SEQ ID NO: 158596 - RNA, 11 nt, Artificial Sequence
  Description of Artificial Sequence: Synthetic oligonucleotide
uuugaggcuca

SEQ ID NO: 158597 - RNA, 10 nt, Artificial Sequence
  Description of Artificial Sequence: Synthetic oligonucleotide
cuacaauugg

SEQ ID NO: 158598 - RNA, 11 nt, Artificial Sequence
  Description of Artificial Sequence: Synthetic oligonucleotide
aguuaggagcc

SEQ ID NO: 158599 - RNA, 12 nt, Artificial Sequence
  Description of Artificial Sequence: Synthetic oligonucleotide
gucaauauccac

SEQ ID NO: 158600 - RNA, 12 nt, Artificial Sequence
  Description of Artificial Sequence: Synthetic oligonucleotide
uguucagucaca

SEQ ID NO: 158601 - RNA, 11 nt, Artificial Sequence
  Description of Artificial Sequence: Synthetic oligonucleotide
cacacacauac

SEQ ID NO: 158602 - RNA, 11 nt, Artificial Sequence
  Description of Artificial Sequence: Synthetic oligonucleotide
uccuuuugcuu

SEQ ID NO: 158603 - RNA, 15 nt, Artificial Sequence
  Description of Artificial Sequence: Synthetic oligonucleotide
uuuaaaguaauuuuu

SEQ ID NO: 158604 - RNA, 12 nt, Artificial Sequence
  Description of Artificial Sequence: Synthetic oligonucleotide
aacagucaaugg

SEQ ID NO: 158605 - RNA, 12 nt, Artificial Sequence
  Description of Artificial Sequence: Synthetic oligonucleotide
cgacaaaccaau

SEQ ID NO: 158606 - RNA, 11 nt, Artificial Sequence
  Description of Artificial Sequence: Synthetic oligonucleotide
cugcuaccacu

SEQ ID NO: 158607 - RNA, 12 nt, Artificial Sequence
  Description of Artificial Sequence: Synthetic oligonucleotide
caagcggucuua

SEQ ID NO: 158608 - RNA, 12 nt, Artificial Sequence
  Description of Artificial Sequence: Synthetic oligonucleotide
gucuuaccggcu

SEQ ID NO: 158609 - RNA, 10 nt, Artificial Sequence
  Description of Artificial Sequence: Synthetic oligonucleotide
auggguuacc

SEQ ID NO: 158610 - RNA, 10 nt, Artificial Sequence
  Description of Artificial Sequence: Synthetic oligonucleotide
uuaccugcga

SEQ ID NO: 158611 - RNA, 11 nt, Artificial Sequence
  Description of Artificial Sequence: Synthetic oligonucleotide
aucuugcugag

SEQ ID NO: 158612 - RNA, 12 nt, Artificial Sequence
  Description of Artificial Sequence: Synthetic oligonucleotide
gcauaaaacagu

SEQ ID NO: 158613 - RNA, 11 nt, Artificial Sequence
  Description of Artificial Sequence: Synthetic oligonucleotide
uccuuuauccu

SEQ ID NO: 158614 - RNA, 11 nt, Artificial Sequence
  Description of Artificial Sequence: Synthetic oligonucleotide
aacgcaaguug

SEQ ID NO: 158615 - RNA, 12 nt, Artificial Sequence
  Description of Artificial Sequence: Synthetic oligonucleotide
aacugaaaccau

SEQ ID NO: 158616 - RNA, 13 nt, Artificial Sequence
  Description of Artificial Sequence: Synthetic oligonucleotide
cuuuguuaaauau

SEQ ID NO: 158617 - RNA, 13 nt, Artificial Sequence
  Description of Artificial Sequence: Synthetic oligonucleotide
uauauuaaaaguu

SEQ ID NO: 158618 - RNA, 12 nt, Artificial Sequence
  Description of Artificial Sequence: Synthetic oligonucleotide
uuuugacuuaac

SEQ ID NO: 158619 - RNA, 12 nt, Artificial Sequence
  Description of Artificial Sequence: Synthetic oligonucleotide
caaacucagcac

SEQ ID NO: 158620 - RNA, 10 nt, Artificial Sequence
  Description of Artificial Sequence: Synthetic oligonucleotide
gcugaccuca

SEQ ID NO: 158621 - RNA, 13 nt, Artificial Sequence
  Description of Artificial Sequence: Synthetic oligonucleotide
uuauucagaucgc

SEQ ID NO: 158622 - RNA, 12 nt, Artificial Sequence
  Description of Artificial Sequence: Synthetic oligonucleotide
ggguucugggau

SEQ ID NO: 158623 - RNA, 14 nt, Artificial Sequence
  Description of Artificial Sequence: Synthetic oligonucleotide
uauuggaaauuaug

SEQ ID NO: 158624 - RNA, 12 nt, Artificial Sequence
  Description of Artificial Sequence: Synthetic oligonucleotide
uggaagcacuag

SEQ ID NO: 158625 - RNA, 12 nt, Artificial Sequence
  Description of Artificial Sequence: Synthetic oligonucleotide
uuuuuaugugga

SEQ ID NO: 158626 - RNA, 11 nt, Artificial Sequence
  Description of Artificial Sequence: Synthetic oligonucleotide
gaauugguaga

SEQ ID NO: 158627 - RNA, 12 nt, Artificial Sequence
  Description of Artificial Sequence: Synthetic oligonucleotide
uagacuuggaga

SEQ ID NO: 158628 - RNA, 12 nt, Artificial Sequence
  Description of Artificial Sequence: Synthetic oligonucleotide
uacaguauucca

SEQ ID NO: 158629 - RNA, 14 nt, Artificial Sequence
  Description of Artificial Sequence: Synthetic oligonucleotide
cacugaugaauuaa

SEQ ID NO: 158630 - RNA, 11 nt, Artificial Sequence
  Description of Artificial Sequence: Synthetic oligonucleotide
cacaucaucac

SEQ ID NO: 158631 - RNA, 12 nt, Artificial Sequence
  Description of Artificial Sequence: Synthetic oligonucleotide
ucaccaaacaga

SEQ ID NO: 158632 - RNA, 11 nt, Artificial Sequence
  Description of Artificial Sequence: Synthetic oligonucleotide
gaacaugaugg

SEQ ID NO: 158633 - RNA, 11 nt, Artificial Sequence
  Description of Artificial Sequence: Synthetic oligonucleotide
auguagacugc

SEQ ID NO: 158634 - RNA, 12 nt, Artificial Sequence
  Description of Artificial Sequence: Synthetic oligonucleotide
gaucuauuuaug

SEQ ID NO: 158635 - RNA, 11 nt, Artificial Sequence
  Description of Artificial Sequence: Synthetic oligonucleotide
cacuauuauca

SEQ ID NO: 158636 - RNA, 10 nt, Artificial Sequence
  Description of Artificial Sequence: Synthetic oligonucleotide
ucaguucugc

SEQ ID NO: 158637 - RNA, 12 nt, Artificial Sequence
  Description of Artificial Sequence: Synthetic oligonucleotide
gauuaaaccuac

SEQ ID NO: 158638 - RNA, 12 nt, Artificial Sequence
  Description of Artificial Sequence: Synthetic oligonucleotide
uaaaauccuucu

SEQ ID NO: 158639 - RNA, 11 nt, Artificial Sequence
  Description of Artificial Sequence: Synthetic oligonucleotide
augcuguagac

SEQ ID NO: 158640 - RNA, 12 nt, Artificial Sequence
  Description of Artificial Sequence: Synthetic oligonucleotide
ugauaggaauag

SEQ ID NO: 158641 - RNA, 10 nt, Artificial Sequence
  Description of Artificial Sequence: Synthetic oligonucleotide
auggcccuga

SEQ ID NO: 158642 - RNA, 10 nt, Artificial Sequence
  Description of Artificial Sequence: Synthetic oligonucleotide
uccucaagca

SEQ ID NO: 158643 - RNA, 9 nt, Artificial Sequence
  Description of Artificial Sequence: Synthetic oligonucleotide
uucagccca

SEQ ID NO: 158644 - RNA, 10 nt, Artificial Sequence
  Description of Artificial Sequence: Synthetic oligonucleotide
cugcugaacc

SEQ ID NO: 158645 - RNA, 11 nt, Artificial Sequence
  Description of Artificial Sequence: Synthetic oligonucleotide
aguucucuuca

SEQ ID NO: 158646 - RNA, 10 nt, Artificial Sequence
  Description of Artificial Sequence: Synthetic oligonucleotide
cagccuagag

SEQ ID NO: 158647 - RNA, 12 nt, Artificial Sequence
  Description of Artificial Sequence: Synthetic oligonucleotide
ucugugaagugu

SEQ ID NO: 158648 - RNA, 13 nt, Artificial Sequence
  Description of Artificial Sequence: Synthetic oligonucleotide
gagaaaauuucaa

SEQ ID NO: 158649 - RNA, 10 nt, Artificial Sequence
  Description of Artificial Sequence: Synthetic oligonucleotide
auccuccuga

SEQ ID NO: 158650 - RNA, 11 nt, Artificial Sequence
  Description of Artificial Sequence: Synthetic oligonucleotide
ugacaucauau

SEQ ID NO: 158651 - RNA, 12 nt, Artificial Sequence
  Description of Artificial Sequence: Synthetic oligonucleotide
aucuucaucaua

SEQ ID NO: 158652 - RNA, 12 nt, Artificial Sequence
  Description of Artificial Sequence: Synthetic oligonucleotide
acuagcuauuaa

SEQ ID NO: 158653 - RNA, 13 nt, Artificial Sequence
  Description of Artificial Sequence: Synthetic oligonucleotide
cucuacuaaaaau

SEQ ID NO: 158654 - RNA, 11 nt, Artificial Sequence
  Description of Artificial Sequence: Synthetic oligonucleotide
cuaucucgccu

SEQ ID NO: 158655 - RNA, 12 nt, Artificial Sequence
  Description of Artificial Sequence: Synthetic oligonucleotide
uucgguccaguu

SEQ ID NO: 158656 - RNA, 10 nt, Artificial Sequence
  Description of Artificial Sequence: Synthetic oligonucleotide
auguagccgc

SEQ ID NO: 158657 - RNA, 11 nt, Artificial Sequence
  Description of Artificial Sequence: Synthetic oligonucleotide
gaggagacuug

SEQ ID NO: 158658 - RNA, 11 nt, Artificial Sequence
  Description of Artificial Sequence: Synthetic oligonucleotide
aguagugagga

SEQ ID NO: 158659 - RNA, 13 nt, Artificial Sequence
  Description of Artificial Sequence: Synthetic oligonucleotide
agaugaguacaaa

SEQ ID NO: 158660 - RNA, 12 nt, Artificial Sequence
  Description of Artificial Sequence: Synthetic oligonucleotide
uuguuaaugggc

SEQ ID NO: 158661 - RNA, 12 nt, Artificial Sequence
  Description of Artificial Sequence: Synthetic oligonucleotide
uuuuaauuuauu

SEQ ID NO: 158662 - RNA, 11 nt, Artificial Sequence
  Description of Artificial Sequence: Synthetic oligonucleotide
auuuaaauaug

SEQ ID NO: 158663 - RNA, 12 nt, Artificial Sequence
  Description of Artificial Sequence: Synthetic oligonucleotide
auccuuuguuuc

SEQ ID NO: 158664 - RNA, 13 nt, Artificial Sequence
  Description of Artificial Sequence: Synthetic oligonucleotide
gucuaaguguuug

SEQ ID NO: 158665 - RNA, 11 nt, Artificial Sequence
  Description of Artificial Sequence: Synthetic oligonucleotide
ccugugacaaa

SEQ ID NO: 158666 - RNA, 12 nt, Artificial Sequence
  Description of Artificial Sequence: Synthetic oligonucleotide
caggcugaauua

SEQ ID NO: 158667 - RNA, 13 nt, Artificial Sequence
  Description of Artificial Sequence: Synthetic oligonucleotide
ucauucuuacaau

SEQ ID NO: 158668 - RNA, 14 nt, Artificial Sequence
  Description of Artificial Sequence: Synthetic oligonucleotide
cauucuuacaauug

SEQ ID NO: 158669 - RNA, 11 nt, Artificial Sequence
  Description of Artificial Sequence: Synthetic oligonucleotide
agagaguguac

SEQ ID NO: 158670 - RNA, 11 nt, Artificial Sequence
  Description of Artificial Sequence: Synthetic oligonucleotide
gaacucagcag

SEQ ID NO: 158671 - RNA, 12 nt, Artificial Sequence
  Description of Artificial Sequence: Synthetic oligonucleotide
uuauuuucagua

SEQ ID NO: 158672 - RNA, 11 nt, Artificial Sequence
  Description of Artificial Sequence: Synthetic oligonucleotide
cuuaaauggaa

SEQ ID NO: 158673 - RNA, 12 nt, Artificial Sequence
  Description of Artificial Sequence: Synthetic oligonucleotide
gccuaaaauugu

SEQ ID NO: 158674 - RNA, 12 nt, Artificial Sequence
  Description of Artificial Sequence: Synthetic oligonucleotide
acuaacaucugg

SEQ ID NO: 158675 - RNA, 11 nt, Artificial Sequence
  Description of Artificial Sequence: Synthetic oligonucleotide
gacugugagcu

SEQ ID NO: 158676 - RNA, 13 nt, Artificial Sequence
  Description of Artificial Sequence: Synthetic oligonucleotide
gcuuuuuauuaau

SEQ ID NO: 158677 - RNA, 12 nt, Artificial Sequence
  Description of Artificial Sequence: Synthetic oligonucleotide
ucuucuuacauu

SEQ ID NO: 158678 - RNA, 14 nt, Artificial Sequence
  Description of Artificial Sequence: Synthetic oligonucleotide
auuuguaaaaaugu

SEQ ID NO: 158679 - RNA, 14 nt, Artificial Sequence
  Description of Artificial Sequence: Synthetic oligonucleotide
ucuuaauucauauu

SEQ ID NO: 158680 - RNA, 12 nt, Artificial Sequence
  Description of Artificial Sequence: Synthetic oligonucleotide
aacuaaucauga

SEQ ID NO: 158681 - RNA, 11 nt, Artificial Sequence
  Description of Artificial Sequence: Synthetic oligonucleotide
cugcucuuggg

SEQ ID NO: 158682 - RNA, 12 nt, Artificial Sequence
  Description of Artificial Sequence: Synthetic oligonucleotide
aguagcuuugag

SEQ ID NO: 158683 - RNA, 13 nt, Artificial Sequence
  Description of Artificial Sequence: Synthetic oligonucleotide
acguaauauuuca

SEQ ID NO: 158684 - RNA, 12 nt, Artificial Sequence
  Description of Artificial Sequence: Synthetic oligonucleotide
auucucuucacu

SEQ ID NO: 158685 - RNA, 13 nt, Artificial Sequence
  Description of Artificial Sequence: Synthetic oligonucleotide
uaaugcuaagaaa

SEQ ID NO: 158686 - RNA, 11 nt, Artificial Sequence
  Description of Artificial Sequence: Synthetic oligonucleotide
cugaaaaucaa

SEQ ID NO: 158687 - RNA, 13 nt, Artificial Sequence
  Description of Artificial Sequence: Synthetic oligonucleotide
auaugauuacuuu

SEQ ID NO: 158688 - RNA, 13 nt, Artificial Sequence
  Description of Artificial Sequence: Synthetic oligonucleotide
auuuuguucuaca

SEQ ID NO: 158689 - RNA, 11 nt, Artificial Sequence
  Description of Artificial Sequence: Synthetic oligonucleotide
ccgggacucuc

SEQ ID NO: 158690 - RNA, 13 nt, Artificial Sequence
  Description of Artificial Sequence: Synthetic oligonucleotide
cuuuaaaguaaag

SEQ ID NO: 158691 - RNA, 12 nt, Artificial Sequence
  Description of Artificial Sequence: Synthetic oligonucleotide
cuggaagccugg

SEQ ID NO: 158692 - RNA, 13 nt, Artificial Sequence
  Description of Artificial Sequence: Synthetic oligonucleotide
aaacaaaagagag

SEQ ID NO: 158693 - RNA, 12 nt, Artificial Sequence
  Description of Artificial Sequence: Synthetic oligonucleotide
ucaguuaugccg

SEQ ID NO: 158694 - RNA, 12 nt, Artificial Sequence
  Description of Artificial Sequence: Synthetic oligonucleotide
aaaagaagucca

SEQ ID NO: 158695 - RNA, 10 nt, Artificial Sequence
  Description of Artificial Sequence: Synthetic oligonucleotide
ggugagguua

SEQ ID NO: 158696 - RNA, 10 nt, Artificial Sequence
  Description of Artificial Sequence: Synthetic oligonucleotide
ggaagaggac

SEQ ID NO: 158697 - RNA, 12 nt, Artificial Sequence
  Description of Artificial Sequence: Synthetic oligonucleotide
agcaaguauugu

SEQ ID NO: 158698 - RNA, 11 nt, Artificial Sequence
  Description of Artificial Sequence: Synthetic oligonucleotide
uuguagcacuc

SEQ ID NO: 158699 - RNA, 13 nt, Artificial Sequence
  Description of Artificial Sequence: Synthetic oligonucleotide
caaaaccacaaau

SEQ ID NO: 158700 - RNA, 11 nt, Artificial Sequence
  Description of Artificial Sequence: Synthetic oligonucleotide
aagcccauaca

SEQ ID NO: 158701 - RNA, 10 nt, Artificial Sequence
  Description of Artificial Sequence: Synthetic oligonucleotide
gcccauacag

SEQ ID NO: 158702 - RNA, 11 nt, Artificial Sequence
  Description of Artificial Sequence: Synthetic oligonucleotide
agaaaccuucc

SEQ ID NO: 158703 - RNA, 9 nt, Artificial Sequence
  Description of Artificial Sequence: Synthetic oligonucleotide
uauaccuac

SEQ ID NO: 158704 - RNA, 12 nt, Artificial Sequence
  Description of Artificial Sequence: Synthetic oligonucleotide
ccaguuuucgga

SEQ ID NO: 158705 - RNA, 8 nt, Artificial Sequence
  Description of Artificial Sequence: Synthetic oligonucleotide
gaacaggg

SEQ ID NO: 158706 - RNA, 12 nt, Artificial Sequence
  Description of Artificial Sequence: Synthetic oligonucleotide
uaacuuuccagu

SEQ ID NO: 158707 - RNA, 13 nt, Artificial Sequence
  Description of Artificial Sequence: Synthetic oligonucleotide
aaguuugguuuug

SEQ ID NO: 158708 - RNA, 11 nt, Artificial Sequence
  Description of Artificial Sequence: Synthetic oligonucleotide
uucccacugua

SEQ ID NO: 158709 - RNA, 12 nt, Artificial Sequence
  Description of Artificial Sequence: Synthetic oligonucleotide
gauaccauauga

SEQ ID NO: 158710 - RNA, 10 nt, Artificial Sequence
  Description of Artificial Sequence: Synthetic oligonucleotide
acaugggcug

SEQ ID NO: 158711 - RNA, 12 nt, Artificial Sequence
  Description of Artificial Sequence: Synthetic oligonucleotide
aacuuuuucaua

SEQ ID NO: 158712 - RNA, 11 nt, Artificial Sequence
  Description of Artificial Sequence: Synthetic oligonucleotide
augaggccgga

SEQ ID NO: 158713 - RNA, 10 nt, Artificial Sequence
  Description of Artificial Sequence: Synthetic oligonucleotide
cugcauuugu

SEQ ID NO: 158714 - RNA, 12 nt, Artificial Sequence
  Description of Artificial Sequence: Synthetic oligonucleotide
auguuuacuacc

SEQ ID NO: 158715 - RNA, 14 nt, Artificial Sequence
  Description of Artificial Sequence: Synthetic oligonucleotide
auuuuuugaugaaa

SEQ ID NO: 158716 - RNA, 13 nt, Artificial Sequence
  Description of Artificial Sequence: Synthetic oligonucleotide
agugugugaauuu

SEQ ID NO: 158717 - RNA, 12 nt, Artificial Sequence
  Description of Artificial Sequence: Synthetic oligonucleotide
agcaauguaugu

SEQ ID NO: 158718 - RNA, 13 nt, Artificial Sequence
  Description of Artificial Sequence: Synthetic oligonucleotide
aagcacauauaua

SEQ ID NO: 158719 - RNA, 13 nt, Artificial Sequence
  Description of Artificial Sequence: Synthetic oligonucleotide
uaauaguuucucc

SEQ ID NO: 158720 - RNA, 12 nt, Artificial Sequence
  Description of Artificial Sequence: Synthetic oligonucleotide
guuucuccaaau

SEQ ID NO: 158721 - RNA, 12 nt, Artificial Sequence
  Description of Artificial Sequence: Synthetic oligonucleotide
acuuccuagaaa

SEQ ID NO: 158722 - RNA, 12 nt, Artificial Sequence
  Description of Artificial Sequence: Synthetic oligonucleotide
acaccauauaug

SEQ ID NO: 158723 - RNA, 13 nt, Artificial Sequence
  Description of Artificial Sequence: Synthetic oligonucleotide
uauaugaauggag

SEQ ID NO: 158724 - RNA, 12 nt, Artificial Sequence
  Description of Artificial Sequence: Synthetic oligonucleotide
cauuuacaggga

SEQ ID NO: 158725 - RNA, 12 nt, Artificial Sequence
  Description of Artificial Sequence: Synthetic oligonucleotide
auuuacagggac

SEQ ID NO: 158726 - RNA, 9 nt, Artificial Sequence
  Description of Artificial Sequence: Synthetic oligonucleotide
gggaccuga

SEQ ID NO: 158727 - RNA, 13 nt, Artificial Sequence
  Description of Artificial Sequence: Synthetic oligonucleotide
guuugacugcauc

SEQ ID NO: 158728 - RNA, 12 nt, Artificial Sequence
  Description of Artificial Sequence: Synthetic oligonucleotide
uugacugcaucg

SEQ ID NO: 158729 - RNA, 11 nt, Artificial Sequence
  Description of Artificial Sequence: Synthetic oligonucleotide
aguucacaggg

SEQ ID NO: 158730 - RNA, 12 nt, Artificial Sequence
  Description of Artificial Sequence: Synthetic oligonucleotide
gcaccucugucc

SEQ ID NO: 158731 - RNA, 14 nt, Artificial Sequence
  Description of Artificial Sequence: Synthetic oligonucleotide
guuugucuuuuuaa

SEQ ID NO: 158732 - RNA, 13 nt, Artificial Sequence
  Description of Artificial Sequence: Synthetic oligonucleotide
uugucuuuuuaag

SEQ ID NO: 158733 - RNA, 12 nt, Artificial Sequence
  Description of Artificial Sequence: Synthetic oligonucleotide
cuaaagguuguc

SEQ ID NO: 158734 - RNA, 11 nt, Artificial Sequence
  Description of Artificial Sequence: Synthetic oligonucleotide
agguugucgac

SEQ ID NO: 158735 - RNA, 12 nt, Artificial Sequence
  Description of Artificial Sequence: Synthetic oligonucleotide
ccuggcaauugu

SEQ ID NO: 158736 - RNA, 11 nt, Artificial Sequence
  Description of Artificial Sequence: Synthetic oligonucleotide
guggugcgagg

SEQ ID NO: 158737 - RNA, 12 nt, Artificial Sequence
  Description of Artificial Sequence: Synthetic oligonucleotide
gagacaugaaau

SEQ ID NO: 158738 - RNA, 12 nt, Artificial Sequence
  Description of Artificial Sequence: Synthetic oligonucleotide
uauauuucucca

SEQ ID NO: 158739 - RNA, 9 nt, Artificial Sequence
  Description of Artificial Sequence: Synthetic oligonucleotide
augaaggcu

SEQ ID NO: 158740 - RNA, 10 nt, Artificial Sequence
  Description of Artificial Sequence: Synthetic oligonucleotide
cuggaguggu

SEQ ID NO: 158741 - RNA, 10 nt, Artificial Sequence
  Description of Artificial Sequence: Synthetic oligonucleotide
ggaagagagg

SEQ ID NO: 158742 - RNA, 11 nt, Artificial Sequence
  Description of Artificial Sequence: Synthetic oligonucleotide
uugcaucgggc

SEQ ID NO: 158743 - RNA, 12 nt, Artificial Sequence
  Description of Artificial Sequence: Synthetic oligonucleotide
uauccuacugug

SEQ ID NO: 158744 - RNA, 12 nt, Artificial Sequence
  Description of Artificial Sequence: Synthetic oligonucleotide
ccuacuguguaa

SEQ ID NO: 158745 - RNA, 11 nt, Artificial Sequence
  Description of Artificial Sequence: Synthetic oligonucleotide
cuuguagugua

SEQ ID NO: 158746 - RNA, 12 nt, Artificial Sequence
  Description of Artificial Sequence: Synthetic oligonucleotide
cuuuguugauug

SEQ ID NO: 158747 - RNA, 13 nt, Artificial Sequence
  Description of Artificial Sequence: Synthetic oligonucleotide
uuguugauugaaa

SEQ ID NO: 158748 - RNA, 14 nt, Artificial Sequence
  Description of Artificial Sequence: Synthetic oligonucleotide
ucuuuuucuuccau

SEQ ID NO: 158749 - RNA, 12 nt, Artificial Sequence
  Description of Artificial Sequence: Synthetic oligonucleotide
aucuuccuucua

SEQ ID NO: 158750 - RNA, 12 nt, Artificial Sequence
  Description of Artificial Sequence: Synthetic oligonucleotide
ugaaugcuucau

SEQ ID NO: 158751 - RNA, 12 nt, Artificial Sequence
  Description of Artificial Sequence: Synthetic oligonucleotide
gaaugcuucaug

SEQ ID NO: 158752 - RNA, 12 nt, Artificial Sequence
  Description of Artificial Sequence: Synthetic oligonucleotide
auucuacuuuga

SEQ ID NO: 158753 - RNA, 12 nt, Artificial Sequence
  Description of Artificial Sequence: Synthetic oligonucleotide
gcaacuacagac

SEQ ID NO: 158754 - RNA, 12 nt, Artificial Sequence
  Description of Artificial Sequence: Synthetic oligonucleotide
accaaggucaac

SEQ ID NO: 158755 - RNA, 12 nt, Artificial Sequence
  Description of Artificial Sequence: Synthetic oligonucleotide
gacuaucucgac

SEQ ID NO: 158756 - RNA, 12 nt, Artificial Sequence
  Description of Artificial Sequence: Synthetic oligonucleotide
accuucccaaac

SEQ ID NO: 158757 - RNA, 13 nt, Artificial Sequence
  Description of Artificial Sequence: Synthetic oligonucleotide
caagcuuagaacu

SEQ ID NO: 158758 - RNA, 14 nt, Artificial Sequence
  Description of Artificial Sequence: Synthetic oligonucleotide
gcuuagaacuuuaa

SEQ ID NO: 158759 - RNA, 13 nt, Artificial Sequence
  Description of Artificial Sequence: Synthetic oligonucleotide
aacuuuaagcaac

SEQ ID NO: 158760 - RNA, 10 nt, Artificial Sequence
  Description of Artificial Sequence: Synthetic oligonucleotide
agaccaccac

SEQ ID NO: 158761 - RNA, 13 nt, Artificial Sequence
  Description of Artificial Sequence: Synthetic oligonucleotide
cgagaaauaaagu

SEQ ID NO: 158762 - RNA, 13 nt, Artificial Sequence
  Description of Artificial Sequence: Synthetic oligonucleotide
gagaaauaaaguu

SEQ ID NO: 158763 - RNA, 11 nt, Artificial Sequence
  Description of Artificial Sequence: Synthetic oligonucleotide
ggaaaugaucc

SEQ ID NO: 158764 - RNA, 12 nt, Artificial Sequence
  Description of Artificial Sequence: Synthetic oligonucleotide
aagaaaugaaac

SEQ ID NO: 158765 - RNA, 12 nt, Artificial Sequence
  Description of Artificial Sequence: Synthetic oligonucleotide
uuuccauccucc

SEQ ID NO: 158766 - RNA, 14 nt, Artificial Sequence
  Description of Artificial Sequence: Synthetic oligonucleotide
cugaaaaucuuuga

SEQ ID NO: 158767 - RNA, 10 nt, Artificial Sequence
  Description of Artificial Sequence: Synthetic oligonucleotide
gccguucagg

SEQ ID NO: 158768 - RNA, 12 nt, Artificial Sequence
  Description of Artificial Sequence: Synthetic oligonucleotide
aggguccagaag

SEQ ID NO: 158769 - RNA, 12 nt, Artificial Sequence
  Description of Artificial Sequence: Synthetic oligonucleotide
caagacugcuug

SEQ ID NO: 158770 - RNA, 12 nt, Artificial Sequence
  Description of Artificial Sequence: Synthetic oligonucleotide
ccaugucuuugg

SEQ ID NO: 158771 - RNA, 10 nt, Artificial Sequence
  Description of Artificial Sequence: Synthetic oligonucleotide
ccugaaacac

SEQ ID NO: 158772 - RNA, 11 nt, Artificial Sequence
  Description of Artificial Sequence: Synthetic oligonucleotide
cucuguaccuc

SEQ ID NO: 158773 - RNA, 11 nt, Artificial Sequence
  Description of Artificial Sequence: Synthetic oligonucleotide
gcaagacaaga

SEQ ID NO: 158774 - RNA, 12 nt, Artificial Sequence
  Description of Artificial Sequence: Synthetic oligonucleotide
caagacaagaaa

SEQ ID NO: 158775 - RNA, 11 nt, Artificial Sequence
  Description of Artificial Sequence: Synthetic oligonucleotide
guacaagaucc

SEQ ID NO: 158776 - RNA, 11 nt, Artificial Sequence
  Description of Artificial Sequence: Synthetic oligonucleotide
guacuugcaga

SEQ ID NO: 158777 - RNA, 12 nt, Artificial Sequence
  Description of Artificial Sequence: Synthetic oligonucleotide
gaucgauacaga

SEQ ID NO: 158778 - RNA, 12 nt, Artificial Sequence
  Description of Artificial Sequence: Synthetic oligonucleotide
auaaaaauaaau

SEQ ID NO: 158779 - RNA, 12 nt, Artificial Sequence
  Description of Artificial Sequence: Synthetic oligonucleotide
aaaaauaaauau

SEQ ID NO: 158780 - RNA, 12 nt, Artificial Sequence
  Description of Artificial Sequence: Synthetic oligonucleotide
uugacugcugug

SEQ ID NO: 158781 - RNA, 12 nt, Artificial Sequence
  Description of Artificial Sequence: Synthetic oligonucleotide
gagaugagagac

SEQ ID NO: 158782 - RNA, 9 nt, Artificial Sequence
  Description of Artificial Sequence: Synthetic oligonucleotide
cccacuugg

SEQ ID NO: 158783 - RNA, 3960 nt, Homo sapiens
cacaggcugagcagucaggcccacagcaucugaccccaggcccagcucguccuggcuggccugggucggccucuggaguauggucuggcgggugcccccuuucuugcuccccauccucuucuuggcuucucaugugggcgcggcgguggaccugacgcugcuggccaaccugcggcucacggacccccagcgcuucuuccugacuugcgugucuggggaggccggggcggggaggggcucggacgccuggggcccgccccugcugcuggagaaggacgaccguaucgugcgcaccccgcccgggccaccccugcgccuggcgcgcaacgguucgcaccaggucacgcuucgcggcuucuccaagcccucggaccucgugggcgucuucuccugcgugggcggugcuggggcgcggcgcacgcgcgucaucuacgugcacaacagcccuggagcccaccugcuuccagacaaggucacacacacugugaacaaaggugacaccgcuguacuuucugcacgugugcacaaggagaagcagacagacgugaucuggaagagcaacggauccuacuucuacacccuggacuggcaugaagcccaggaugggcgguuccugcugcagcucccaaaugugcagccaccaucgagcggcaucuacagugccacuuaccuggaagccagcccccugggcagcgccuucuuucggcucaucgugcgggguuguggggcugggcgcugggggccaggcuguaccaaggagugcccagguugccuacauggaggugucugccacgaccaugacggcgaauguguaugccccccuggcuucacuggcacccgcugugaacaggccugcagagagggccguuuugggcagagcugccaggagcagugcccaggcauaucaggcugccggggccucaccuucugccucccagaccccuauggcugcucuuguggaucuggcuggagaggaagccagugccaagaagcuugugccccuggucauuuuggggcugauugccgacuccagugccagugucagaaugguggcacuugugaccgguucagugguugugucugccccucuggguggcauggagugcacugugagaagucagaccggaucccccagauccucaacauggccucagaacuggaguucaacuuagagacgaugccccggaucaacugugcagcugcagggaaccccuuccccgugcggggcagcauagagcuacgcaagccagacggcacugugcuccuguccaccaaggccauuguggagccagagaagaccacagcugaguucgaggugccccgcuugguucuugcggacaguggguucugggagugccguguguccacaucuggcggccaagacagccggcgcuucaaggucaaugugaaagugccccccgugccccuggcugcaccucggcuccugaccaagcagagccgccagcuuguggucuccccgcuggucucguucucuggggauggacccaucuccacuguccgccugcacuaccggccccaggacaguaccauggacuggucgaccauugugguggaccccagugagaacgugacguuaaugaaccugaggccaaagacaggauacaguguucgugugcagcugagccggccaggggaaggaggagagggggccugggggccucccacccucaugaccacagacuguccugagccuuuguugcagccgugguuggagggcuggcauguggaaggcacugaccggcugcgagugagcugguccuugcccuuggugcccgggccacuggugggcgacgguuuccugcugcgccugugggacgggacacgggggcaggagcggcgggagaacgucucauccccccaggcccgcacugcccuccugacgggacucacgccuggcacccacuaccagcuggaugugcagcucuaccacugcacccuccugggcccggccucgcccccugcacacgugcuucugccccccagugggccuccagccccccgacaccuccacgcccaggcccucucagacuccgagauccagcugacauggaagcacccggaggcucugccugggccaauauccaaguacguuguggaggugcagguggcugggggugcaggagacccacuguggauagacguggacaggccugaggagacaagcaccaucauccguggccucaacgccagcacgcgcuaccucuuccgcaugcgggccagcauucaggggcucggggacuggagcaacacaguagaagaguccacccugggcaacgggcugcaggcugagggcccaguccaagagagccgggcagcugaagagggccuggaucagcagcugauccuggcgguggugggcuccgugucugccaccugccucaccauccuggccgcccuuuuaacccuggugugcauccgcagaagcugccugcaucggagacgcaccuucaccuaccagucaggcucgggcgaggagaccauccugcaguucagcucagggaccuugacacuuacccggcggccaaaacugcagcccgagccccugagcuacccagugcuagagugggaggacaucaccuuugaggaccucaucggggaggggaacuucggccaggucauccgggccaugaucaagaaggacgggcugaagaugaacgcagccaucaaaaugcugaaagaguaugccucugaaaaugaccaucgugacuuugcgggagaacuggaaguucugugcaaauuggggcaucaccccaacaucaucaaccuccugggggccuguaagaaccgagguuacuuguauaucgcuauugaauaugcccccuacgggaaccugcuagauuuucugcggaaaagccggguccuagagacugacccagcuuuugcucgagagcaugggacagccucuacccuuagcucccggcagcugcugcguuucgccagugaugcggccaauggcaugcaguaccugagugagaagcaguucauccacagggaccuggcugcccggaaugugcuggucggagagaaccuagccuccaagauugcagacuucggccuuucucggggagaggagguuuaugugaagaagacgauggggcgucucccugugcgcuggauggccauugagucccugaacuacagugucuauaccaccaagagugaugucugguccuuuggaguccuucuuugggagauagugagccuuggagguacacccuacuguggcaugaccugugccgagcucuaugaaaagcugccccagggcuaccgcauggagcagccucgaaacugugacgaugaaguguacgagcugaugcgucagugcuggcgggaccgucccuaugagcgaccccccuuugcccagauugcgcuacagcuaggccgcaugcuggaagccaggaaggccuaugugaacaugucgcuguuugagaacuucacuuacgcgggcauugaugccacagcugaggaggccugagcugccauccagccagaacguggcucugcuggccggagcaaacucugcugucuaaccugugaccagucugacccuuacagccucugacuuaagcugccucaaggaauuuuuuuaacuuaagggagaaaaaaagggaucuggggauggggugggcuuaggggaacuggguucccaugcuuuguaggugucucauagcuauccugggcauccuucuuucuaguucagcugccccacagguguguuucccaucccacugcucccccaacacaaacccccacuccagcuccuucgcuuaagccagcacucacaccacuaacaugcccuguucagcuacucccacucccggccugucauucagaaaaaaauaaauguucuaauaagcuccaaaaaaaaaaaaaaaaaaaaaaaaaaaaaaaaaaaaaaaaaaaaaaaaaaaaaaaaaaaaaaaaaaaaaaaaaaaaaaa

SEQ ID NO: 158784 - RNA, 19 nt, Artificial Sequence
  Description of Artificial Sequence: Synthetic oligonucleotide
cacaggcugagcagucagg

SEQ ID NO: 158785 - RNA, 19 nt, Artificial Sequence
  Description of Artificial Sequence: Synthetic oligonucleotide
gcccacagcaucugacccc

SEQ ID NO: 158786 - RNA, 19 nt, Artificial Sequence
  Description of Artificial Sequence: Synthetic oligonucleotide
caggcccagcucguccugg

SEQ ID NO: 158787 - RNA, 19 nt, Artificial Sequence
  Description of Artificial Sequence: Synthetic oligonucleotide
gcuggccugggucggccuc

SEQ ID NO: 158788 - RNA, 19 nt, Artificial Sequence
  Description of Artificial Sequence: Synthetic oligonucleotide
cuggaguauggucuggcgg

SEQ ID NO: 158789 - RNA, 19 nt, Artificial Sequence
  Description of Artificial Sequence: Synthetic oligonucleotide
ggugcccccuuucuugcuc

SEQ ID NO: 158790 - RNA, 19 nt, Artificial Sequence
  Description of Artificial Sequence: Synthetic oligonucleotide
ccccauccucuucuuggcu

SEQ ID NO: 158791 - RNA, 19 nt, Artificial Sequence
  Description of Artificial Sequence: Synthetic oligonucleotide
uucucaugugggcgcggcg

SEQ ID NO: 158792 - RNA, 19 nt, Artificial Sequence
  Description of Artificial Sequence: Synthetic oligonucleotide
gguggaccugacgcugcug

SEQ ID NO: 158793 - RNA, 19 nt, Artificial Sequence
  Description of Artificial Sequence: Synthetic oligonucleotide
ggccaaccugcggcucacg

SEQ ID NO: 158794 - RNA, 19 nt, Artificial Sequence
  Description of Artificial Sequence: Synthetic oligonucleotide
ggacccccagcgcuucuuc

SEQ ID NO: 158795 - RNA, 19 nt, Artificial Sequence
  Description of Artificial Sequence: Synthetic oligonucleotide
ccugacuugcgugucuggg

SEQ ID NO: 158796 - RNA, 19 nt, Artificial Sequence
  Description of Artificial Sequence: Synthetic oligonucleotide
ggaggccggggcggggagg

SEQ ID NO: 158797 - RNA, 19 nt, Artificial Sequence
  Description of Artificial Sequence: Synthetic oligonucleotide
gggcucggacgccuggggc

SEQ ID NO: 158798 - RNA, 19 nt, Artificial Sequence
  Description of Artificial Sequence: Synthetic oligonucleotide
cccgccccugcugcuggag

SEQ ID NO: 158799 - RNA, 19 nt, Artificial Sequence
  Description of Artificial Sequence: Synthetic oligonucleotide
gaaggacgaccguaucgug

SEQ ID NO: 158800 - RNA, 19 nt, Artificial Sequence
  Description of Artificial Sequence: Synthetic oligonucleotide
gcgcaccccgcccgggcca

SEQ ID NO: 158801 - RNA, 19 nt, Artificial Sequence
  Description of Artificial Sequence: Synthetic oligonucleotide
accccugcgccuggcgcgc

SEQ ID NO: 158802 - RNA, 19 nt, Artificial Sequence
  Description of Artificial Sequence: Synthetic oligonucleotide
caacgguucgcaccagguc

SEQ ID NO: 158803 - RNA, 19 nt, Artificial Sequence
  Description of Artificial Sequence: Synthetic oligonucleotide
cacgcuucgcggcuucucc

SEQ ID NO: 158804 - RNA, 19 nt, Artificial Sequence
  Description of Artificial Sequence: Synthetic oligonucleotide
caagcccucggaccucgug

SEQ ID NO: 158805 - RNA, 19 nt, Artificial Sequence
  Description of Artificial Sequence: Synthetic oligonucleotide
gggcgucuucuccugcgug

SEQ ID NO: 158806 - RNA, 19 nt, Artificial Sequence
  Description of Artificial Sequence: Synthetic oligonucleotide
gggcggugcuggggcgcgg

SEQ ID NO: 158807 - RNA, 19 nt, Artificial Sequence
  Description of Artificial Sequence: Synthetic oligonucleotide
gcgcacgcgcgucaucuac

SEQ ID NO: 158808 - RNA, 19 nt, Artificial Sequence
  Description of Artificial Sequence: Synthetic oligonucleotide
cgugcacaacagcccugga

SEQ ID NO: 158809 - RNA, 19 nt, Artificial Sequence
  Description of Artificial Sequence: Synthetic oligonucleotide
agcccaccugcuuccagac

SEQ ID NO: 158810 - RNA, 19 nt, Artificial Sequence
  Description of Artificial Sequence: Synthetic oligonucleotide
caaggucacacacacugug

SEQ ID NO: 158811 - RNA, 19 nt, Artificial Sequence
  Description of Artificial Sequence: Synthetic oligonucleotide
gaacaaaggugacaccgcu

SEQ ID NO: 158812 - RNA, 19 nt, Artificial Sequence
  Description of Artificial Sequence: Synthetic oligonucleotide
uguacuuucugcacgugug

SEQ ID NO: 158813 - RNA, 19 nt, Artificial Sequence
  Description of Artificial Sequence: Synthetic oligonucleotide
gcacaaggagaagcagaca

SEQ ID NO: 158814 - RNA, 19 nt, Artificial Sequence
  Description of Artificial Sequence: Synthetic oligonucleotide
agacgugaucuggaagagc

SEQ ID NO: 158815 - RNA, 19 nt, Artificial Sequence
  Description of Artificial Sequence: Synthetic oligonucleotide
caacggauccuacuucuac

SEQ ID NO: 158816 - RNA, 19 nt, Artificial Sequence
  Description of Artificial Sequence: Synthetic oligonucleotide
cacccuggacuggcaugaa

SEQ ID NO: 158817 - RNA, 19 nt, Artificial Sequence
  Description of Artificial Sequence: Synthetic oligonucleotide
agcccaggaugggcgguuc

SEQ ID NO: 158818 - RNA, 19 nt, Artificial Sequence
  Description of Artificial Sequence: Synthetic oligonucleotide
ccugcugcagcucccaaau

SEQ ID NO: 158819 - RNA, 19 nt, Artificial Sequence
  Description of Artificial Sequence: Synthetic oligonucleotide
ugugcagccaccaucgagc

SEQ ID NO: 158820 - RNA, 19 nt, Artificial Sequence
  Description of Artificial Sequence: Synthetic oligonucleotide
cggcaucuacagugccacu

SEQ ID NO: 158821 - RNA, 19 nt, Artificial Sequence
  Description of Artificial Sequence: Synthetic oligonucleotide
uuaccuggaagccagcccc

SEQ ID NO: 158822 - RNA, 19 nt, Artificial Sequence
  Description of Artificial Sequence: Synthetic oligonucleotide
ccugggcagcgccuucuuu

SEQ ID NO: 158823 - RNA, 19 nt, Artificial Sequence
  Description of Artificial Sequence: Synthetic oligonucleotide
ucggcucaucgugcggggu

SEQ ID NO: 158824 - RNA, 19 nt, Artificial Sequence
  Description of Artificial Sequence: Synthetic oligonucleotide
uuguggggcugggcgcugg

SEQ ID NO: 158825 - RNA, 19 nt, Artificial Sequence
  Description of Artificial Sequence: Synthetic oligonucleotide
ggggccaggcuguaccaag

SEQ ID NO: 158826 - RNA, 19 nt, Artificial Sequence
  Description of Artificial Sequence: Synthetic oligonucleotide
ggagugcccagguugccua

SEQ ID NO: 158827 - RNA, 19 nt, Artificial Sequence
  Description of Artificial Sequence: Synthetic oligonucleotide
acauggaggugucugccac

SEQ ID NO: 158828 - RNA, 19 nt, Artificial Sequence
  Description of Artificial Sequence: Synthetic oligonucleotide
cgaccaugacggcgaaugu

SEQ ID NO: 158829 - RNA, 19 nt, Artificial Sequence
  Description of Artificial Sequence: Synthetic oligonucleotide
uguaugccccccuggcuuc

SEQ ID NO: 158830 - RNA, 19 nt, Artificial Sequence
  Description of Artificial Sequence: Synthetic oligonucleotide
cacuggcacccgcugugaa

SEQ ID NO: 158831 - RNA, 19 nt, Artificial Sequence
  Description of Artificial Sequence: Synthetic oligonucleotide
acaggccugcagagagggc

SEQ ID NO: 158832 - RNA, 19 nt, Artificial Sequence
  Description of Artificial Sequence: Synthetic oligonucleotide
ccguuuugggcagagcugc

SEQ ID NO: 158833 - RNA, 19 nt, Artificial Sequence
  Description of Artificial Sequence: Synthetic oligonucleotide
ccaggagcagugcccaggc

SEQ ID NO: 158834 - RNA, 19 nt, Artificial Sequence
  Description of Artificial Sequence: Synthetic oligonucleotide
cauaucaggcugccggggc

SEQ ID NO: 158835 - RNA, 19 nt, Artificial Sequence
  Description of Artificial Sequence: Synthetic oligonucleotide
ccucaccuucugccuccca

SEQ ID NO: 158836 - RNA, 19 nt, Artificial Sequence
  Description of Artificial Sequence: Synthetic oligonucleotide
agaccccuauggcugcucu

SEQ ID NO: 158837 - RNA, 19 nt, Artificial Sequence
  Description of Artificial Sequence: Synthetic oligonucleotide
uuguggaucuggcuggaga

SEQ ID NO: 158838 - RNA, 19 nt, Artificial Sequence
  Description of Artificial Sequence: Synthetic oligonucleotide
aggaagccagugccaagaa

SEQ ID NO: 158839 - RNA, 19 nt, Artificial Sequence
  Description of Artificial Sequence: Synthetic oligonucleotide
agcuugugccccuggucau

SEQ ID NO: 158840 - RNA, 19 nt, Artificial Sequence
  Description of Artificial Sequence: Synthetic oligonucleotide
uuuuggggcugauugccga

SEQ ID NO: 158841 - RNA, 19 nt, Artificial Sequence
  Description of Artificial Sequence: Synthetic oligonucleotide
acuccagugccagugucag

SEQ ID NO: 158842 - RNA, 19 nt, Artificial Sequence
  Description of Artificial Sequence: Synthetic oligonucleotide
gaaugguggcacuugugac

SEQ ID NO: 158843 - RNA, 19 nt, Artificial Sequence
  Description of Artificial Sequence: Synthetic oligonucleotide
ccgguucagugguuguguc

SEQ ID NO: 158844 - RNA, 19 nt, Artificial Sequence
  Description of Artificial Sequence: Synthetic oligonucleotide
cugccccucuggguggcau

SEQ ID NO: 158845 - RNA, 19 nt, Artificial Sequence
  Description of Artificial Sequence: Synthetic oligonucleotide
uggagugcacugugagaag

SEQ ID NO: 158846 - RNA, 19 nt, Artificial Sequence
  Description of Artificial Sequence: Synthetic oligonucleotide
gucagaccggaucccccag

SEQ ID NO: 158847 - RNA, 19 nt, Artificial Sequence
  Description of Artificial Sequence: Synthetic oligonucleotide
gauccucaacauggccuca

SEQ ID NO: 158848 - RNA, 19 nt, Artificial Sequence
  Description of Artificial Sequence: Synthetic oligonucleotide
agaacuggaguucaacuua

SEQ ID NO: 158849 - RNA, 19 nt, Artificial Sequence
  Description of Artificial Sequence: Synthetic oligonucleotide
agagacgaugccccggauc

SEQ ID NO: 158850 - RNA, 19 nt, Artificial Sequence
  Description of Artificial Sequence: Synthetic oligonucleotide
caacugugcagcugcaggg

SEQ ID NO: 158851 - RNA, 19 nt, Artificial Sequence
  Description of Artificial Sequence: Synthetic oligonucleotide
gaaccccuuccccgugcgg

SEQ ID NO: 158852 - RNA, 19 nt, Artificial Sequence
  Description of Artificial Sequence: Synthetic oligonucleotide
gggcagcauagagcuacgc

SEQ ID NO: 158853 - RNA, 19 nt, Artificial Sequence
  Description of Artificial Sequence: Synthetic oligonucleotide
caagccagacggcacugug

SEQ ID NO: 158854 - RNA, 19 nt, Artificial Sequence
  Description of Artificial Sequence: Synthetic oligonucleotide
gcuccuguccaccaaggcc

SEQ ID NO: 158855 - RNA, 19 nt, Artificial Sequence
  Description of Artificial Sequence: Synthetic oligonucleotide
cauuguggagccagagaag

SEQ ID NO: 158856 - RNA, 19 nt, Artificial Sequence
  Description of Artificial Sequence: Synthetic oligonucleotide
gaccacagcugaguucgag

SEQ ID NO: 158857 - RNA, 19 nt, Artificial Sequence
  Description of Artificial Sequence: Synthetic oligonucleotide
ggugccccgcuugguucuu

SEQ ID NO: 158858 - RNA, 19 nt, Artificial Sequence
  Description of Artificial Sequence: Synthetic oligonucleotide
ugcggacaguggguucugg

SEQ ID NO: 158859 - RNA, 19 nt, Artificial Sequence
  Description of Artificial Sequence: Synthetic oligonucleotide
ggagugccguguguccaca

SEQ ID NO: 158860 - RNA, 19 nt, Artificial Sequence
  Description of Artificial Sequence: Synthetic oligonucleotide
aucuggcggccaagacagc

SEQ ID NO: 158861 - RNA, 19 nt, Artificial Sequence
  Description of Artificial Sequence: Synthetic oligonucleotide
ccggcgcuucaaggucaau

SEQ ID NO: 158862 - RNA, 19 nt, Artificial Sequence
  Description of Artificial Sequence: Synthetic oligonucleotide
ugugaaagugccccccgug

SEQ ID NO: 158863 - RNA, 19 nt, Artificial Sequence
  Description of Artificial Sequence: Synthetic oligonucleotide
gccccuggcugcaccucgg

SEQ ID NO: 158864 - RNA, 19 nt, Artificial Sequence
  Description of Artificial Sequence: Synthetic oligonucleotide
gcuccugaccaagcagagc

SEQ ID NO: 158865 - RNA, 19 nt, Artificial Sequence
  Description of Artificial Sequence: Synthetic oligonucleotide
ccgccagcuuguggucucc

SEQ ID NO: 158866 - RNA, 19 nt, Artificial Sequence
  Description of Artificial Sequence: Synthetic oligonucleotide
cccgcuggucucguucucu

SEQ ID NO: 158867 - RNA, 19 nt, Artificial Sequence
  Description of Artificial Sequence: Synthetic oligonucleotide
uggggauggacccaucucc

SEQ ID NO: 158868 - RNA, 19 nt, Artificial Sequence
  Description of Artificial Sequence: Synthetic oligonucleotide
cacuguccgccugcacuac

SEQ ID NO: 158869 - RNA, 19 nt, Artificial Sequence
  Description of Artificial Sequence: Synthetic oligonucleotide
ccggccccaggacaguacc

SEQ ID NO: 158870 - RNA, 19 nt, Artificial Sequence
  Description of Artificial Sequence: Synthetic oligonucleotide
cauggacuggucgaccauu

SEQ ID NO: 158871 - RNA, 19 nt, Artificial Sequence
  Description of Artificial Sequence: Synthetic oligonucleotide
ugugguggaccccagugag

SEQ ID NO: 158872 - RNA, 19 nt, Artificial Sequence
  Description of Artificial Sequence: Synthetic oligonucleotide
gaacgugacguuaaugaac

SEQ ID NO: 158873 - RNA, 19 nt, Artificial Sequence
  Description of Artificial Sequence: Synthetic oligonucleotide
ccugaggccaaagacagga

SEQ ID NO: 158874 - RNA, 19 nt, Artificial Sequence
  Description of Artificial Sequence: Synthetic oligonucleotide
auacaguguucgugugcag

SEQ ID NO: 158875 - RNA, 19 nt, Artificial Sequence
  Description of Artificial Sequence: Synthetic oligonucleotide
gcugagccggccaggggaa

SEQ ID NO: 158876 - RNA, 19 nt, Artificial Sequence
  Description of Artificial Sequence: Synthetic oligonucleotide
aggaggagagggggccugg

SEQ ID NO: 158877 - RNA, 19 nt, Artificial Sequence
  Description of Artificial Sequence: Synthetic oligonucleotide
ggggccucccacccucaug

SEQ ID NO: 158878 - RNA, 19 nt, Artificial Sequence
  Description of Artificial Sequence: Synthetic oligonucleotide
gaccacagacuguccugag

SEQ ID NO: 158879 - RNA, 19 nt, Artificial Sequence
  Description of Artificial Sequence: Synthetic oligonucleotide
gccuuuguugcagccgugg

SEQ ID NO: 158880 - RNA, 19 nt, Artificial Sequence
  Description of Artificial Sequence: Synthetic oligonucleotide
guuggagggcuggcaugug

SEQ ID NO: 158881 - RNA, 19 nt, Artificial Sequence
  Description of Artificial Sequence: Synthetic oligonucleotide
ggaaggcacugaccggcug

SEQ ID NO: 158882 - RNA, 19 nt, Artificial Sequence
  Description of Artificial Sequence: Synthetic oligonucleotide
gcgagugagcugguccuug

SEQ ID NO: 158883 - RNA, 19 nt, Artificial Sequence
  Description of Artificial Sequence: Synthetic oligonucleotide
gcccuuggugcccgggcca

SEQ ID NO: 158884 - RNA, 19 nt, Artificial Sequence
  Description of Artificial Sequence: Synthetic oligonucleotide
acuggugggcgacgguuuc

SEQ ID NO: 158885 - RNA, 19 nt, Artificial Sequence
  Description of Artificial Sequence: Synthetic oligonucleotide
ccugcugcgccugugggac

SEQ ID NO: 158886 - RNA, 19 nt, Artificial Sequence
  Description of Artificial Sequence: Synthetic oligonucleotide
cgggacacgggggcaggag

SEQ ID NO: 158887 - RNA, 19 nt, Artificial Sequence
  Description of Artificial Sequence: Synthetic oligonucleotide
gcggcgggagaacgucuca

SEQ ID NO: 158888 - RNA, 19 nt, Artificial Sequence
  Description of Artificial Sequence: Synthetic oligonucleotide
auccccccaggcccgcacu

SEQ ID NO: 158889 - RNA, 19 nt, Artificial Sequence
  Description of Artificial Sequence: Synthetic oligonucleotide
ugcccuccugacgggacuc

SEQ ID NO: 158890 - RNA, 19 nt, Artificial Sequence
  Description of Artificial Sequence: Synthetic oligonucleotide
cacgccuggcacccacuac

SEQ ID NO: 158891 - RNA, 19 nt, Artificial Sequence
  Description of Artificial Sequence: Synthetic oligonucleotide
ccagcuggaugugcagcuc

SEQ ID NO: 158892 - RNA, 19 nt, Artificial Sequence
  Description of Artificial Sequence: Synthetic oligonucleotide
cuaccacugcacccuccug

SEQ ID NO: 158893 - RNA, 19 nt, Artificial Sequence
  Description of Artificial Sequence: Synthetic oligonucleotide
gggcccggccucgcccccu

SEQ ID NO: 158894 - RNA, 19 nt, Artificial Sequence
  Description of Artificial Sequence: Synthetic oligonucleotide
ugcacacgugcuucugccc

SEQ ID NO: 158895 - RNA, 19 nt, Artificial Sequence
  Description of Artificial Sequence: Synthetic oligonucleotide
ccccagugggccuccagcc

SEQ ID NO: 158896 - RNA, 19 nt, Artificial Sequence
  Description of Artificial Sequence: Synthetic oligonucleotide
cccccgacaccuccacgcc

SEQ ID NO: 158897 - RNA, 19 nt, Artificial Sequence
  Description of Artificial Sequence: Synthetic oligonucleotide
ccaggcccucucagacucc

SEQ ID NO: 158898 - RNA, 19 nt, Artificial Sequence
  Description of Artificial Sequence: Synthetic oligonucleotide
cgagauccagcugacaugg

SEQ ID NO: 158899 - RNA, 19 nt, Artificial Sequence
  Description of Artificial Sequence: Synthetic oligonucleotide
gaagcacccggaggcucug

SEQ ID NO: 158900 - RNA, 19 nt, Artificial Sequence
  Description of Artificial Sequence: Synthetic oligonucleotide
gccugggccaauauccaag

SEQ ID NO: 158901 - RNA, 19 nt, Artificial Sequence
  Description of Artificial Sequence: Synthetic oligonucleotide
guacguuguggaggugcag

SEQ ID NO: 158902 - RNA, 19 nt, Artificial Sequence
  Description of Artificial Sequence: Synthetic oligonucleotide
gguggcugggggugcagga

SEQ ID NO: 158903 - RNA, 19 nt, Artificial Sequence
  Description of Artificial Sequence: Synthetic oligonucleotide
agacccacuguggauagac

SEQ ID NO: 158904 - RNA, 19 nt, Artificial Sequence
  Description of Artificial Sequence: Synthetic oligonucleotide
cguggacaggccugaggag

SEQ ID NO: 158905 - RNA, 19 nt, Artificial Sequence
  Description of Artificial Sequence: Synthetic oligonucleotide
gacaagcaccaucauccgu

SEQ ID NO: 158906 - RNA, 19 nt, Artificial Sequence
  Description of Artificial Sequence: Synthetic oligonucleotide
uggccucaacgccagcacg

SEQ ID NO: 158907 - RNA, 19 nt, Artificial Sequence
  Description of Artificial Sequence: Synthetic oligonucleotide
gcgcuaccucuuccgcaug

SEQ ID NO: 158908 - RNA, 19 nt, Artificial Sequence
  Description of Artificial Sequence: Synthetic oligonucleotide
gcgggccagcauucagggg

SEQ ID NO: 158909 - RNA, 19 nt, Artificial Sequence
  Description of Artificial Sequence: Synthetic oligonucleotide
gcucggggacuggagcaac

SEQ ID NO: 158910 - RNA, 19 nt, Artificial Sequence
  Description of Artificial Sequence: Synthetic oligonucleotide
cacaguagaagaguccacc

SEQ ID NO: 158911 - RNA, 19 nt, Artificial Sequence
  Description of Artificial Sequence: Synthetic oligonucleotide
ccugggcaacgggcugcag

SEQ ID NO: 158912 - RNA, 19 nt, Artificial Sequence
  Description of Artificial Sequence: Synthetic oligonucleotide
ggcugagggcccaguccaa

SEQ ID NO: 158913 - RNA, 19 nt, Artificial Sequence
  Description of Artificial Sequence: Synthetic oligonucleotide
agagagccgggcagcugaa

SEQ ID NO: 158914 - RNA, 19 nt, Artificial Sequence
  Description of Artificial Sequence: Synthetic oligonucleotide
agagggccuggaucagcag

SEQ ID NO: 158915 - RNA, 19 nt, Artificial Sequence
  Description of Artificial Sequence: Synthetic oligonucleotide
gcugauccuggcgguggug

SEQ ID NO: 158916 - RNA, 19 nt, Artificial Sequence
  Description of Artificial Sequence: Synthetic oligonucleotide
gggcuccgugucugccacc

SEQ ID NO: 158917 - RNA, 19 nt, Artificial Sequence
  Description of Artificial Sequence: Synthetic oligonucleotide
cugccucaccauccuggcc

SEQ ID NO: 158918 - RNA, 19 nt, Artificial Sequence
  Description of Artificial Sequence: Synthetic oligonucleotide
cgcccuuuuaacccuggug

SEQ ID NO: 158919 - RNA, 19 nt, Artificial Sequence
  Description of Artificial Sequence: Synthetic oligonucleotide
gugcauccgcagaagcugc

SEQ ID NO: 158920 - RNA, 19 nt, Artificial Sequence
  Description of Artificial Sequence: Synthetic oligonucleotide
ccugcaucggagacgcacc

SEQ ID NO: 158921 - RNA, 19 nt, Artificial Sequence
  Description of Artificial Sequence: Synthetic oligonucleotide
cuucaccuaccagucaggc

SEQ ID NO: 158922 - RNA, 19 nt, Artificial Sequence
  Description of Artificial Sequence: Synthetic oligonucleotide
cucgggcgaggagaccauc

SEQ ID NO: 158923 - RNA, 19 nt, Artificial Sequence
  Description of Artificial Sequence: Synthetic oligonucleotide
ccugcaguucagcucaggg

SEQ ID NO: 158924 - RNA, 19 nt, Artificial Sequence
  Description of Artificial Sequence: Synthetic oligonucleotide
gaccuugacacuuacccgg

SEQ ID NO: 158925 - RNA, 19 nt, Artificial Sequence
  Description of Artificial Sequence: Synthetic oligonucleotide
gcggccaaaacugcagccc

SEQ ID NO: 158926 - RNA, 19 nt, Artificial Sequence
  Description of Artificial Sequence: Synthetic oligonucleotide
cgagccccugagcuaccca

SEQ ID NO: 158927 - RNA, 19 nt, Artificial Sequence
  Description of Artificial Sequence: Synthetic oligonucleotide
agugcuagagugggaggac

SEQ ID NO: 158928 - RNA, 19 nt, Artificial Sequence
  Description of Artificial Sequence: Synthetic oligonucleotide
caucaccuuugaggaccuc

SEQ ID NO: 158929 - RNA, 19 nt, Artificial Sequence
  Description of Artificial Sequence: Synthetic oligonucleotide
caucggggaggggaacuuc

SEQ ID NO: 158930 - RNA, 19 nt, Artificial Sequence
  Description of Artificial Sequence: Synthetic oligonucleotide
cggccaggucauccgggcc

SEQ ID NO: 158931 - RNA, 19 nt, Artificial Sequence
  Description of Artificial Sequence: Synthetic oligonucleotide
caugaucaagaaggacggg

SEQ ID NO: 158932 - RNA, 19 nt, Artificial Sequence
  Description of Artificial Sequence: Synthetic oligonucleotide
gcugaagaugaacgcagcc

SEQ ID NO: 158933 - RNA, 19 nt, Artificial Sequence
  Description of Artificial Sequence: Synthetic oligonucleotide
caucaaaaugcugaaagag

SEQ ID NO: 158934 - RNA, 19 nt, Artificial Sequence
  Description of Artificial Sequence: Synthetic oligonucleotide
guaugccucugaaaaugac

SEQ ID NO: 158935 - RNA, 19 nt, Artificial Sequence
  Description of Artificial Sequence: Synthetic oligonucleotide
ccaucgugacuuugcggga

SEQ ID NO: 158936 - RNA, 19 nt, Artificial Sequence
  Description of Artificial Sequence: Synthetic oligonucleotide
agaacuggaaguucugugc

SEQ ID NO: 158937 - RNA, 19 nt, Artificial Sequence
  Description of Artificial Sequence: Synthetic oligonucleotide
caaauuggggcaucacccc

SEQ ID NO: 158938 - RNA, 19 nt, Artificial Sequence
  Description of Artificial Sequence: Synthetic oligonucleotide
caacaucaucaaccuccug

SEQ ID NO: 158939 - RNA, 19 nt, Artificial Sequence
  Description of Artificial Sequence: Synthetic oligonucleotide
gggggccuguaagaaccga

SEQ ID NO: 158940 - RNA, 19 nt, Artificial Sequence
  Description of Artificial Sequence: Synthetic oligonucleotide
agguuacuuguauaucgcu

SEQ ID NO: 158941 - RNA, 19 nt, Artificial Sequence
  Description of Artificial Sequence: Synthetic oligonucleotide
uauugaauaugcccccuac

SEQ ID NO: 158942 - RNA, 19 nt, Artificial Sequence
  Description of Artificial Sequence: Synthetic oligonucleotide
cgggaaccugcuagauuuu

SEQ ID NO: 158943 - RNA, 19 nt, Artificial Sequence
  Description of Artificial Sequence: Synthetic oligonucleotide
ucugcggaaaagccggguc

SEQ ID NO: 158944 - RNA, 19 nt, Artificial Sequence
  Description of Artificial Sequence: Synthetic oligonucleotide
ccuagagacugacccagcu

SEQ ID NO: 158945 - RNA, 19 nt, Artificial Sequence
  Description of Artificial Sequence: Synthetic oligonucleotide
uuuugcucgagagcauggg

SEQ ID NO: 158946 - RNA, 19 nt, Artificial Sequence
  Description of Artificial Sequence: Synthetic oligonucleotide
gacagccucuacccuuagc

SEQ ID NO: 158947 - RNA, 19 nt, Artificial Sequence
  Description of Artificial Sequence: Synthetic oligonucleotide
cucccggcagcugcugcgu

SEQ ID NO: 158948 - RNA, 19 nt, Artificial Sequence
  Description of Artificial Sequence: Synthetic oligonucleotide
uuucgccagugaugcggcc

SEQ ID NO: 158949 - RNA, 19 nt, Artificial Sequence
  Description of Artificial Sequence: Synthetic oligonucleotide
caauggcaugcaguaccug

SEQ ID NO: 158950 - RNA, 19 nt, Artificial Sequence
  Description of Artificial Sequence: Synthetic oligonucleotide
gagugagaagcaguucauc

SEQ ID NO: 158951 - RNA, 19 nt, Artificial Sequence
  Description of Artificial Sequence: Synthetic oligonucleotide
ccacagggaccuggcugcc

SEQ ID NO: 158952 - RNA, 19 nt, Artificial Sequence
  Description of Artificial Sequence: Synthetic oligonucleotide
ccggaaugugcuggucgga

SEQ ID NO: 158953 - RNA, 19 nt, Artificial Sequence
  Description of Artificial Sequence: Synthetic oligonucleotide
agagaaccuagccuccaag

SEQ ID NO: 158954 - RNA, 19 nt, Artificial Sequence
  Description of Artificial Sequence: Synthetic oligonucleotide
gauugcagacuucggccuu

SEQ ID NO: 158955 - RNA, 19 nt, Artificial Sequence
  Description of Artificial Sequence: Synthetic oligonucleotide
uucucggggagaggagguu

SEQ ID NO: 158956 - RNA, 19 nt, Artificial Sequence
  Description of Artificial Sequence: Synthetic oligonucleotide
uuaugugaagaagacgaug

SEQ ID NO: 158957 - RNA, 19 nt, Artificial Sequence
  Description of Artificial Sequence: Synthetic oligonucleotide
ggggcgucucccugugcgc

SEQ ID NO: 158958 - RNA, 19 nt, Artificial Sequence
  Description of Artificial Sequence: Synthetic oligonucleotide
cuggauggccauugagucc

SEQ ID NO: 158959 - RNA, 19 nt, Artificial Sequence
  Description of Artificial Sequence: Synthetic oligonucleotide
ccugaacuacagugucuau

SEQ ID NO: 158960 - RNA, 19 nt, Artificial Sequence
  Description of Artificial Sequence: Synthetic oligonucleotide
uaccaccaagagugauguc

SEQ ID NO: 158961 - RNA, 19 nt, Artificial Sequence
  Description of Artificial Sequence: Synthetic oligonucleotide
cugguccuuuggaguccuu

SEQ ID NO: 158962 - RNA, 19 nt, Artificial Sequence
  Description of Artificial Sequence: Synthetic oligonucleotide
ucuuugggagauagugagc

SEQ ID NO: 158963 - RNA, 19 nt, Artificial Sequence
  Description of Artificial Sequence: Synthetic oligonucleotide
ccuuggagguacacccuac

SEQ ID NO: 158964 - RNA, 19 nt, Artificial Sequence
  Description of Artificial Sequence: Synthetic oligonucleotide
cuguggcaugaccugugcc

SEQ ID NO: 158965 - RNA, 19 nt, Artificial Sequence
  Description of Artificial Sequence: Synthetic oligonucleotide
cgagcucuaugaaaagcug

SEQ ID NO: 158966 - RNA, 19 nt, Artificial Sequence
  Description of Artificial Sequence: Synthetic oligonucleotide
gccccagggcuaccgcaug

SEQ ID NO: 158967 - RNA, 19 nt, Artificial Sequence
  Description of Artificial Sequence: Synthetic oligonucleotide
ggagcagccucgaaacugu

SEQ ID NO: 158968 - RNA, 19 nt, Artificial Sequence
  Description of Artificial Sequence: Synthetic oligonucleotide
ugacgaugaaguguacgag

SEQ ID NO: 158969 - RNA, 19 nt, Artificial Sequence
  Description of Artificial Sequence: Synthetic oligonucleotide
gcugaugcgucagugcugg

SEQ ID NO: 158970 - RNA, 19 nt, Artificial Sequence
  Description of Artificial Sequence: Synthetic oligonucleotide
gcgggaccgucccuaugag

SEQ ID NO: 158971 - RNA, 19 nt, Artificial Sequence
  Description of Artificial Sequence: Synthetic oligonucleotide
gcgaccccccuuugcccag

SEQ ID NO: 158972 - RNA, 19 nt, Artificial Sequence
  Description of Artificial Sequence: Synthetic oligonucleotide
gauugcgcuacagcuaggc

SEQ ID NO: 158973 - RNA, 19 nt, Artificial Sequence
  Description of Artificial Sequence: Synthetic oligonucleotide
ccgcaugcuggaagccagg

SEQ ID NO: 158974 - RNA, 19 nt, Artificial Sequence
  Description of Artificial Sequence: Synthetic oligonucleotide
gaaggccuaugugaacaug

SEQ ID NO: 158975 - RNA, 19 nt, Artificial Sequence
  Description of Artificial Sequence: Synthetic oligonucleotide
gucgcuguuugagaacuuc

SEQ ID NO: 158976 - RNA, 19 nt, Artificial Sequence
  Description of Artificial Sequence: Synthetic oligonucleotide
cacuuacgcgggcauugau

SEQ ID NO: 158977 - RNA, 19 nt, Artificial Sequence
  Description of Artificial Sequence: Synthetic oligonucleotide
ugccacagcugaggaggcc

SEQ ID NO: 158978 - RNA, 19 nt, Artificial Sequence
  Description of Artificial Sequence: Synthetic oligonucleotide
cugagcugccauccagcca

SEQ ID NO: 158979 - RNA, 19 nt, Artificial Sequence
  Description of Artificial Sequence: Synthetic oligonucleotide
agaacguggcucugcuggc

SEQ ID NO: 158980 - RNA, 19 nt, Artificial Sequence
  Description of Artificial Sequence: Synthetic oligonucleotide
ccggagcaaacucugcugu

SEQ ID NO: 158981 - RNA, 19 nt, Artificial Sequence
  Description of Artificial Sequence: Synthetic oligonucleotide
ucuaaccugugaccagucu

SEQ ID NO: 158982 - RNA, 19 nt, Artificial Sequence
  Description of Artificial Sequence: Synthetic oligonucleotide
ugacccuuacagccucuga

SEQ ID NO: 158983 - RNA, 19 nt, Artificial Sequence
  Description of Artificial Sequence: Synthetic oligonucleotide
acuuaagcugccucaagga

SEQ ID NO: 158984 - RNA, 19 nt, Artificial Sequence
  Description of Artificial Sequence: Synthetic oligonucleotide
aauuuuuuuaacuuaaggg

SEQ ID NO: 158985 - RNA, 19 nt, Artificial Sequence
  Description of Artificial Sequence: Synthetic oligonucleotide
gagaaaaaaagggaucugg

SEQ ID NO: 158986 - RNA, 19 nt, Artificial Sequence
  Description of Artificial Sequence: Synthetic oligonucleotide
gggauggggugggcuuagg

SEQ ID NO: 158987 - RNA, 19 nt, Artificial Sequence
  Description of Artificial Sequence: Synthetic oligonucleotide
gggaacuggguucccaugc

SEQ ID NO: 158988 - RNA, 19 nt, Artificial Sequence
  Description of Artificial Sequence: Synthetic oligonucleotide
cuuuguaggugucucauag

SEQ ID NO: 158989 - RNA, 19 nt, Artificial Sequence
  Description of Artificial Sequence: Synthetic oligonucleotide
gcuauccugggcauccuuc

SEQ ID NO: 158990 - RNA, 19 nt, Artificial Sequence
  Description of Artificial Sequence: Synthetic oligonucleotide
cuuucuaguucagcugccc

SEQ ID NO: 158991 - RNA, 19 nt, Artificial Sequence
  Description of Artificial Sequence: Synthetic oligonucleotide
ccacagguguguuucccau

SEQ ID NO: 158992 - RNA, 19 nt, Artificial Sequence
  Description of Artificial Sequence: Synthetic oligonucleotide
ucccacugcucccccaaca

SEQ ID NO: 158993 - RNA, 19 nt, Artificial Sequence
  Description of Artificial Sequence: Synthetic oligonucleotide
acaaacccccacuccagcu

SEQ ID NO: 158994 - RNA, 19 nt, Artificial Sequence
  Description of Artificial Sequence: Synthetic oligonucleotide
uccuucgcuuaagccagca

SEQ ID NO: 158995 - RNA, 19 nt, Artificial Sequence
  Description of Artificial Sequence: Synthetic oligonucleotide
acucacaccacuaacaugc

SEQ ID NO: 158996 - RNA, 19 nt, Artificial Sequence
  Description of Artificial Sequence: Synthetic oligonucleotide
cccuguucagcuacuccca

SEQ ID NO: 158997 - RNA, 19 nt, Artificial Sequence
  Description of Artificial Sequence: Synthetic oligonucleotide
acucccggccugucauuca

SEQ ID NO: 158998 - RNA, 19 nt, Artificial Sequence
  Description of Artificial Sequence: Synthetic oligonucleotide
agaaaaaaauaaauguucu

SEQ ID NO: 158999 - RNA, 19 nt, Artificial Sequence
  Description of Artificial Sequence: Synthetic oligonucleotide
uaauaagcuccaaaaaaaa

SEQ ID NO: 159000 - RNA, 25 nt, Artificial Sequence
  Description of Artificial Sequence: Synthetic oligonucleotide
cacaggcugagcagucaggcccaca

SEQ ID NO: 159001 - RNA, 25 nt, Artificial Sequence
  Description of Artificial Sequence: Synthetic oligonucleotide
agcaucugaccccaggcccagcucg

SEQ ID NO: 159002 - RNA, 25 nt, Artificial Sequence
  Description of Artificial Sequence: Synthetic oligonucleotide
guccuggcuggccugggucggccuc

SEQ ID NO: 159003 - RNA, 25 nt, Artificial Sequence
  Description of Artificial Sequence: Synthetic oligonucleotide
cuggaguauggucuggcgggugccc

SEQ ID NO: 159004 - RNA, 25 nt, Artificial Sequence
  Description of Artificial Sequence: Synthetic oligonucleotide
cccuuucuugcuccccauccucuuc

SEQ ID NO: 159005 - RNA, 25 nt, Artificial Sequence
  Description of Artificial Sequence: Synthetic oligonucleotide
cuuggcuucucaugugggcgcggcg

SEQ ID NO: 159006 - RNA, 25 nt, Artificial Sequence
  Description of Artificial Sequence: Synthetic oligonucleotide
gguggaccugacgcugcuggccaac

SEQ ID NO: 159007 - RNA, 25 nt, Artificial Sequence
  Description of Artificial Sequence: Synthetic oligonucleotide
ccugcggcucacggacccccagcgc

SEQ ID NO: 159008 - RNA, 25 nt, Artificial Sequence
  Description of Artificial Sequence: Synthetic oligonucleotide
cuucuuccugacuugcgugucuggg

SEQ ID NO: 159009 - RNA, 25 nt, Artificial Sequence
  Description of Artificial Sequence: Synthetic oligonucleotide
ggaggccggggcggggaggggcucg

SEQ ID NO: 159010 - RNA, 25 nt, Artificial Sequence
  Description of Artificial Sequence: Synthetic oligonucleotide
ggacgccuggggcccgccccugcug

SEQ ID NO: 159011 - RNA, 25 nt, Artificial Sequence
  Description of Artificial Sequence: Synthetic oligonucleotide
gcuggagaaggacgaccguaucgug

SEQ ID NO: 159012 - RNA, 25 nt, Artificial Sequence
  Description of Artificial Sequence: Synthetic oligonucleotide
gcgcaccccgcccgggccaccccug

SEQ ID NO: 159013 - RNA, 25 nt, Artificial Sequence
  Description of Artificial Sequence: Synthetic oligonucleotide
gcgccuggcgcgcaacgguucgcac

SEQ ID NO: 159014 - RNA, 25 nt, Artificial Sequence
  Description of Artificial Sequence: Synthetic oligonucleotide
ccaggucacgcuucgcggcuucucc

SEQ ID NO: 159015 - RNA, 25 nt, Artificial Sequence
  Description of Artificial Sequence: Synthetic oligonucleotide
caagcccucggaccucgugggcguc

SEQ ID NO: 159016 - RNA, 25 nt, Artificial Sequence
  Description of Artificial Sequence: Synthetic oligonucleotide
cuucuccugcgugggcggugcuggg

SEQ ID NO: 159017 - RNA, 25 nt, Artificial Sequence
  Description of Artificial Sequence: Synthetic oligonucleotide
ggcgcggcgcacgcgcgucaucuac

SEQ ID NO: 159018 - RNA, 25 nt, Artificial Sequence
  Description of Artificial Sequence: Synthetic oligonucleotide
cgugcacaacagcccuggagcccac

SEQ ID NO: 159019 - RNA, 25 nt, Artificial Sequence
  Description of Artificial Sequence: Synthetic oligonucleotide
ccugcuuccagacaaggucacacac

SEQ ID NO: 159020 - RNA, 25 nt, Artificial Sequence
  Description of Artificial Sequence: Synthetic oligonucleotide
cacugugaacaaaggugacaccgcu

SEQ ID NO: 159021 - RNA, 25 nt, Artificial Sequence
  Description of Artificial Sequence: Synthetic oligonucleotide
uguacuuucugcacgugugcacaag

SEQ ID NO: 159022 - RNA, 25 nt, Artificial Sequence
  Description of Artificial Sequence: Synthetic oligonucleotide
ggagaagcagacagacgugaucugg

SEQ ID NO: 159023 - RNA, 25 nt, Artificial Sequence
  Description of Artificial Sequence: Synthetic oligonucleotide
gaagagcaacggauccuacuucuac

SEQ ID NO: 159024 - RNA, 25 nt, Artificial Sequence
  Description of Artificial Sequence: Synthetic oligonucleotide
cacccuggacuggcaugaagcccag

SEQ ID NO: 159025 - RNA, 25 nt, Artificial Sequence
  Description of Artificial Sequence: Synthetic oligonucleotide
ggaugggcgguuccugcugcagcuc

SEQ ID NO: 159026 - RNA, 25 nt, Artificial Sequence
  Description of Artificial Sequence: Synthetic oligonucleotide
cccaaaugugcagccaccaucgagc

SEQ ID NO: 159027 - RNA, 25 nt, Artificial Sequence
  Description of Artificial Sequence: Synthetic oligonucleotide
cggcaucuacagugccacuuaccug

SEQ ID NO: 159028 - RNA, 25 nt, Artificial Sequence
  Description of Artificial Sequence: Synthetic oligonucleotide
ggaagccagcccccugggcagcgcc

SEQ ID NO: 159029 - RNA, 25 nt, Artificial Sequence
  Description of Artificial Sequence: Synthetic oligonucleotide
cuucuuucggcucaucgugcggggu

SEQ ID NO: 159030 - RNA, 25 nt, Artificial Sequence
  Description of Artificial Sequence: Synthetic oligonucleotide
uuguggggcugggcgcugggggcca

SEQ ID NO: 159031 - RNA, 25 nt, Artificial Sequence
  Description of Artificial Sequence: Synthetic oligonucleotide
aggcuguaccaaggagugcccaggu

SEQ ID NO: 159032 - RNA, 25 nt, Artificial Sequence
  Description of Artificial Sequence: Synthetic oligonucleotide
uugccuacauggaggugucugccac

SEQ ID NO: 159033 - RNA, 25 nt, Artificial Sequence
  Description of Artificial Sequence: Synthetic oligonucleotide
cgaccaugacggcgaauguguaugc

SEQ ID NO: 159034 - RNA, 25 nt, Artificial Sequence
  Description of Artificial Sequence: Synthetic oligonucleotide
ccccccuggcuucacuggcacccgc

SEQ ID NO: 159035 - RNA, 25 nt, Artificial Sequence
  Description of Artificial Sequence: Synthetic oligonucleotide
cugugaacaggccugcagagagggc

SEQ ID NO: 159036 - RNA, 25 nt, Artificial Sequence
  Description of Artificial Sequence: Synthetic oligonucleotide
ccguuuugggcagagcugccaggag

SEQ ID NO: 159037 - RNA, 25 nt, Artificial Sequence
  Description of Artificial Sequence: Synthetic oligonucleotide
gcagugcccaggcauaucaggcugc

SEQ ID NO: 159038 - RNA, 25 nt, Artificial Sequence
  Description of Artificial Sequence: Synthetic oligonucleotide
ccggggccucaccuucugccuccca

SEQ ID NO: 159039 - RNA, 25 nt, Artificial Sequence
  Description of Artificial Sequence: Synthetic oligonucleotide
agaccccuauggcugcucuugugga

SEQ ID NO: 159040 - RNA, 25 nt, Artificial Sequence
  Description of Artificial Sequence: Synthetic oligonucleotide
aucuggcuggagaggaagccagugc

SEQ ID NO: 159041 - RNA, 25 nt, Artificial Sequence
  Description of Artificial Sequence: Synthetic oligonucleotide
ccaagaagcuugugccccuggucau

SEQ ID NO: 159042 - RNA, 25 nt, Artificial Sequence
  Description of Artificial Sequence: Synthetic oligonucleotide
uuuuggggcugauugccgacuccag

SEQ ID NO: 159043 - RNA, 25 nt, Artificial Sequence
  Description of Artificial Sequence: Synthetic oligonucleotide
gugccagugucagaaugguggcacu

SEQ ID NO: 159044 - RNA, 25 nt, Artificial Sequence
  Description of Artificial Sequence: Synthetic oligonucleotide
uugugaccgguucagugguuguguc

SEQ ID NO: 159045 - RNA, 25 nt, Artificial Sequence
  Description of Artificial Sequence: Synthetic oligonucleotide
cugccccucuggguggcauggagug

SEQ ID NO: 159046 - RNA, 25 nt, Artificial Sequence
  Description of Artificial Sequence: Synthetic oligonucleotide
gcacugugagaagucagaccggauc

SEQ ID NO: 159047 - RNA, 25 nt, Artificial Sequence
  Description of Artificial Sequence: Synthetic oligonucleotide
cccccagauccucaacauggccuca

SEQ ID NO: 159048 - RNA, 25 nt, Artificial Sequence
  Description of Artificial Sequence: Synthetic oligonucleotide
agaacuggaguucaacuuagagacg

SEQ ID NO: 159049 - RNA, 25 nt, Artificial Sequence
  Description of Artificial Sequence: Synthetic oligonucleotide
gaugccccggaucaacugugcagcu

SEQ ID NO: 159050 - RNA, 25 nt, Artificial Sequence
  Description of Artificial Sequence: Synthetic oligonucleotide
ugcagggaaccccuuccccgugcgg

SEQ ID NO: 159051 - RNA, 25 nt, Artificial Sequence
  Description of Artificial Sequence: Synthetic oligonucleotide
gggcagcauagagcuacgcaagcca

SEQ ID NO: 159052 - RNA, 25 nt, Artificial Sequence
  Description of Artificial Sequence: Synthetic oligonucleotide
agacggcacugugcuccuguccacc

SEQ ID NO: 159053 - RNA, 25 nt, Artificial Sequence
  Description of Artificial Sequence: Synthetic oligonucleotide
caaggccauuguggagccagagaag

SEQ ID NO: 159054 - RNA, 25 nt, Artificial Sequence
  Description of Artificial Sequence: Synthetic oligonucleotide
gaccacagcugaguucgaggugccc

SEQ ID NO: 159055 - RNA, 25 nt, Artificial Sequence
  Description of Artificial Sequence: Synthetic oligonucleotide
ccgcuugguucuugcggacaguggg

SEQ ID NO: 159056 - RNA, 25 nt, Artificial Sequence
  Description of Artificial Sequence: Synthetic oligonucleotide
guucugggagugccguguguccaca

SEQ ID NO: 159057 - RNA, 25 nt, Artificial Sequence
  Description of Artificial Sequence: Synthetic oligonucleotide
aucuggcggccaagacagccggcgc

SEQ ID NO: 159058 - RNA, 25 nt, Artificial Sequence
  Description of Artificial Sequence: Synthetic oligonucleotide
cuucaaggucaaugugaaagugccc

SEQ ID NO: 159059 - RNA, 25 nt, Artificial Sequence
  Description of Artificial Sequence: Synthetic oligonucleotide
ccccgugccccuggcugcaccucgg

SEQ ID NO: 159060 - RNA, 25 nt, Artificial Sequence
  Description of Artificial Sequence: Synthetic oligonucleotide
gcuccugaccaagcagagccgccag

SEQ ID NO: 159061 - RNA, 25 nt, Artificial Sequence
  Description of Artificial Sequence: Synthetic oligonucleotide
gcuuguggucuccccgcuggucucg

SEQ ID NO: 159062 - RNA, 25 nt, Artificial Sequence
  Description of Artificial Sequence: Synthetic oligonucleotide
guucucuggggauggacccaucucc

SEQ ID NO: 159063 - RNA, 25 nt, Artificial Sequence
  Description of Artificial Sequence: Synthetic oligonucleotide
cacuguccgccugcacuaccggccc

SEQ ID NO: 159064 - RNA, 25 nt, Artificial Sequence
  Description of Artificial Sequence: Synthetic oligonucleotide
ccaggacaguaccauggacuggucg

SEQ ID NO: 159065 - RNA, 25 nt, Artificial Sequence
  Description of Artificial Sequence: Synthetic oligonucleotide
gaccauugugguggaccccagugag

SEQ ID NO: 159066 - RNA, 25 nt, Artificial Sequence
  Description of Artificial Sequence: Synthetic oligonucleotide
gaacgugacguuaaugaaccugagg

SEQ ID NO: 159067 - RNA, 25 nt, Artificial Sequence
  Description of Artificial Sequence: Synthetic oligonucleotide
gccaaagacaggauacaguguucgu

SEQ ID NO: 159068 - RNA, 25 nt, Artificial Sequence
  Description of Artificial Sequence: Synthetic oligonucleotide
ugugcagcugagccggccaggggaa

SEQ ID NO: 159069 - RNA, 25 nt, Artificial Sequence
  Description of Artificial Sequence: Synthetic oligonucleotide
aggaggagagggggccugggggccu

SEQ ID NO: 159070 - RNA, 25 nt, Artificial Sequence
  Description of Artificial Sequence: Synthetic oligonucleotide
ucccacccucaugaccacagacugu

SEQ ID NO: 159071 - RNA, 25 nt, Artificial Sequence
  Description of Artificial Sequence: Synthetic oligonucleotide
uccugagccuuuguugcagccgugg

SEQ ID NO: 159072 - RNA, 25 nt, Artificial Sequence
  Description of Artificial Sequence: Synthetic oligonucleotide
guuggagggcuggcauguggaaggc

SEQ ID NO: 159073 - RNA, 25 nt, Artificial Sequence
  Description of Artificial Sequence: Synthetic oligonucleotide
cacugaccggcugcgagugagcugg

SEQ ID NO: 159074 - RNA, 25 nt, Artificial Sequence
  Description of Artificial Sequence: Synthetic oligonucleotide
guccuugcccuuggugcccgggcca

SEQ ID NO: 159075 - RNA, 25 nt, Artificial Sequence
  Description of Artificial Sequence: Synthetic oligonucleotide
acuggugggcgacgguuuccugcug

SEQ ID NO: 159076 - RNA, 25 nt, Artificial Sequence
  Description of Artificial Sequence: Synthetic oligonucleotide
gcgccugugggacgggacacggggg

SEQ ID NO: 159077 - RNA, 25 nt, Artificial Sequence
  Description of Artificial Sequence: Synthetic oligonucleotide
gcaggagcggcgggagaacgucuca

SEQ ID NO: 159078 - RNA, 25 nt, Artificial Sequence
  Description of Artificial Sequence: Synthetic oligonucleotide
auccccccaggcccgcacugcccuc

SEQ ID NO: 159079 - RNA, 25 nt, Artificial Sequence
  Description of Artificial Sequence: Synthetic oligonucleotide
ccugacgggacucacgccuggcacc

SEQ ID NO: 159080 - RNA, 25 nt, Artificial Sequence
  Description of Artificial Sequence: Synthetic oligonucleotide
ccacuaccagcuggaugugcagcuc

SEQ ID NO: 159081 - RNA, 25 nt, Artificial Sequence
  Description of Artificial Sequence: Synthetic oligonucleotide
cuaccacugcacccuccugggcccg

SEQ ID NO: 159082 - RNA, 25 nt, Artificial Sequence
  Description of Artificial Sequence: Synthetic oligonucleotide
ggccucgcccccugcacacgugcuu

SEQ ID NO: 159083 - RNA, 25 nt, Artificial Sequence
  Description of Artificial Sequence: Synthetic oligonucleotide
ucugccccccagugggccuccagcc

SEQ ID NO: 159084 - RNA, 25 nt, Artificial Sequence
  Description of Artificial Sequence: Synthetic oligonucleotide
cccccgacaccuccacgcccaggcc

SEQ ID NO: 159085 - RNA, 25 nt, Artificial Sequence
  Description of Artificial Sequence: Synthetic oligonucleotide
ccucucagacuccgagauccagcug

SEQ ID NO: 159086 - RNA, 25 nt, Artificial Sequence
  Description of Artificial Sequence: Synthetic oligonucleotide
gacauggaagcacccggaggcucug

SEQ ID NO: 159087 - RNA, 25 nt, Artificial Sequence
  Description of Artificial Sequence: Synthetic oligonucleotide
gccugggccaauauccaaguacguu

SEQ ID NO: 159088 - RNA, 25 nt, Artificial Sequence
  Description of Artificial Sequence: Synthetic oligonucleotide
uguggaggugcagguggcugggggu

SEQ ID NO: 159089 - RNA, 25 nt, Artificial Sequence
  Description of Artificial Sequence: Synthetic oligonucleotide
ugcaggagacccacuguggauagac

SEQ ID NO: 159090 - RNA, 25 nt, Artificial Sequence
  Description of Artificial Sequence: Synthetic oligonucleotide
cguggacaggccugaggagacaagc

SEQ ID NO: 159091 - RNA, 25 nt, Artificial Sequence
  Description of Artificial Sequence: Synthetic oligonucleotide
caccaucauccguggccucaacgcc

SEQ ID NO: 159092 - RNA, 25 nt, Artificial Sequence
  Description of Artificial Sequence: Synthetic oligonucleotide
cagcacgcgcuaccucuuccgcaug

SEQ ID NO: 159093 - RNA, 25 nt, Artificial Sequence
  Description of Artificial Sequence: Synthetic oligonucleotide
gcgggccagcauucaggggcucggg

SEQ ID NO: 159094 - RNA, 25 nt, Artificial Sequence
  Description of Artificial Sequence: Synthetic oligonucleotide
ggacuggagcaacacaguagaagag

SEQ ID NO: 159095 - RNA, 25 nt, Artificial Sequence
  Description of Artificial Sequence: Synthetic oligonucleotide
guccacccugggcaacgggcugcag

SEQ ID NO: 159096 - RNA, 25 nt, Artificial Sequence
  Description of Artificial Sequence: Synthetic oligonucleotide
ggcugagggcccaguccaagagagc

SEQ ID NO: 159097 - RNA, 25 nt, Artificial Sequence
  Description of Artificial Sequence: Synthetic oligonucleotide
ccgggcagcugaagagggccuggau

SEQ ID NO: 159098 - RNA, 25 nt, Artificial Sequence
  Description of Artificial Sequence: Synthetic oligonucleotide
ucagcagcugauccuggcgguggug

SEQ ID NO: 159099 - RNA, 25 nt, Artificial Sequence
  Description of Artificial Sequence: Synthetic oligonucleotide
gggcuccgugucugccaccugccuc

SEQ ID NO: 159100 - RNA, 25 nt, Artificial Sequence
  Description of Artificial Sequence: Synthetic oligonucleotide
caccauccuggccgcccuuuuaacc

SEQ ID NO: 159101 - RNA, 25 nt, Artificial Sequence
  Description of Artificial Sequence: Synthetic oligonucleotide
ccuggugugcauccgcagaagcugc

SEQ ID NO: 159102 - RNA, 25 nt, Artificial Sequence
  Description of Artificial Sequence: Synthetic oligonucleotide
ccugcaucggagacgcaccuucacc

SEQ ID NO: 159103 - RNA, 25 nt, Artificial Sequence
  Description of Artificial Sequence: Synthetic oligonucleotide
cuaccagucaggcucgggcgaggag

SEQ ID NO: 159104 - RNA, 25 nt, Artificial Sequence
  Description of Artificial Sequence: Synthetic oligonucleotide
gaccauccugcaguucagcucaggg

SEQ ID NO: 159105 - RNA, 25 nt, Artificial Sequence
  Description of Artificial Sequence: Synthetic oligonucleotide
gaccuugacacuuacccggcggcca

SEQ ID NO: 159106 - RNA, 25 nt, Artificial Sequence
  Description of Artificial Sequence: Synthetic oligonucleotide
aaaacugcagcccgagccccugagc

SEQ ID NO: 159107 - RNA, 25 nt, Artificial Sequence
  Description of Artificial Sequence: Synthetic oligonucleotide
cuacccagugcuagagugggaggac

SEQ ID NO: 159108 - RNA, 25 nt, Artificial Sequence
  Description of Artificial Sequence: Synthetic oligonucleotide
caucaccuuugaggaccucaucggg

SEQ ID NO: 159109 - RNA, 25 nt, Artificial Sequence
  Description of Artificial Sequence: Synthetic oligonucleotide
ggaggggaacuucggccaggucauc

SEQ ID NO: 159110 - RNA, 25 nt, Artificial Sequence
  Description of Artificial Sequence: Synthetic oligonucleotide
ccgggccaugaucaagaaggacggg

SEQ ID NO: 159111 - RNA, 25 nt, Artificial Sequence
  Description of Artificial Sequence: Synthetic oligonucleotide
gcugaagaugaacgcagccaucaaa

SEQ ID NO: 159112 - RNA, 25 nt, Artificial Sequence
  Description of Artificial Sequence: Synthetic oligonucleotide
aaugcugaaagaguaugccucugaa

SEQ ID NO: 159113 - RNA, 25 nt, Artificial Sequence
  Description of Artificial Sequence: Synthetic oligonucleotide
aaaugaccaucgugacuuugcggga

SEQ ID NO: 159114 - RNA, 25 nt, Artificial Sequence
  Description of Artificial Sequence: Synthetic oligonucleotide
agaacuggaaguucugugcaaauug

SEQ ID NO: 159115 - RNA, 25 nt, Artificial Sequence
  Description of Artificial Sequence: Synthetic oligonucleotide
ggggcaucaccccaacaucaucaac

SEQ ID NO: 159116 - RNA, 25 nt, Artificial Sequence
  Description of Artificial Sequence: Synthetic oligonucleotide
ccuccugggggccuguaagaaccga

SEQ ID NO: 159117 - RNA, 25 nt, Artificial Sequence
  Description of Artificial Sequence: Synthetic oligonucleotide
agguuacuuguauaucgcuauugaa

SEQ ID NO: 159118 - RNA, 25 nt, Artificial Sequence
  Description of Artificial Sequence: Synthetic oligonucleotide
auaugcccccuacgggaaccugcua

SEQ ID NO: 159119 - RNA, 25 nt, Artificial Sequence
  Description of Artificial Sequence: Synthetic oligonucleotide
agauuuucugcggaaaagccggguc

SEQ ID NO: 159120 - RNA, 25 nt, Artificial Sequence
  Description of Artificial Sequence: Synthetic oligonucleotide
ccuagagacugacccagcuuuugcu

SEQ ID NO: 159121 - RNA, 25 nt, Artificial Sequence
  Description of Artificial Sequence: Synthetic oligonucleotide
ucgagagcaugggacagccucuacc

SEQ ID NO: 159122 - RNA, 25 nt, Artificial Sequence
  Description of Artificial Sequence: Synthetic oligonucleotide
ccuuagcucccggcagcugcugcgu

SEQ ID NO: 159123 - RNA, 25 nt, Artificial Sequence
  Description of Artificial Sequence: Synthetic oligonucleotide
uuucgccagugaugcggccaauggc

SEQ ID NO: 159124 - RNA, 25 nt, Artificial Sequence
  Description of Artificial Sequence: Synthetic oligonucleotide
caugcaguaccugagugagaagcag

SEQ ID NO: 159125 - RNA, 25 nt, Artificial Sequence
  Description of Artificial Sequence: Synthetic oligonucleotide
guucauccacagggaccuggcugcc

SEQ ID NO: 159126 - RNA, 25 nt, Artificial Sequence
  Description of Artificial Sequence: Synthetic oligonucleotide
ccggaaugugcuggucggagagaac

SEQ ID NO: 159127 - RNA, 25 nt, Artificial Sequence
  Description of Artificial Sequence: Synthetic oligonucleotide
ccuagccuccaagauugcagacuuc

SEQ ID NO: 159128 - RNA, 25 nt, Artificial Sequence
  Description of Artificial Sequence: Synthetic oligonucleotide
cggccuuucucggggagaggagguu

SEQ ID NO: 159129 - RNA, 25 nt, Artificial Sequence
  Description of Artificial Sequence: Synthetic oligonucleotide
uuaugugaagaagacgauggggcgu

SEQ ID NO: 159130 - RNA, 25 nt, Artificial Sequence
  Description of Artificial Sequence: Synthetic oligonucleotide
ucucccugugcgcuggauggccauu

SEQ ID NO: 159131 - RNA, 25 nt, Artificial Sequence
  Description of Artificial Sequence: Synthetic oligonucleotide
ugagucccugaacuacagugucuau

SEQ ID NO: 159132 - RNA, 25 nt, Artificial Sequence
  Description of Artificial Sequence: Synthetic oligonucleotide
uaccaccaagagugaugucuggucc

SEQ ID NO: 159133 - RNA, 25 nt, Artificial Sequence
  Description of Artificial Sequence: Synthetic oligonucleotide
cuuuggaguccuucuuugggagaua

SEQ ID NO: 159134 - RNA, 25 nt, Artificial Sequence
  Description of Artificial Sequence: Synthetic oligonucleotide
agugagccuuggagguacacccuac

SEQ ID NO: 159135 - RNA, 25 nt, Artificial Sequence
  Description of Artificial Sequence: Synthetic oligonucleotide
cuguggcaugaccugugccgagcuc

SEQ ID NO: 159136 - RNA, 25 nt, Artificial Sequence
  Description of Artificial Sequence: Synthetic oligonucleotide
cuaugaaaagcugccccagggcuac

SEQ ID NO: 159137 - RNA, 25 nt, Artificial Sequence
  Description of Artificial Sequence: Synthetic oligonucleotide
ccgcauggagcagccucgaaacugu

SEQ ID NO: 159138 - RNA, 25 nt, Artificial Sequence
  Description of Artificial Sequence: Synthetic oligonucleotide
ugacgaugaaguguacgagcugaug

SEQ ID NO: 159139 - RNA, 25 nt, Artificial Sequence
  Description of Artificial Sequence: Synthetic oligonucleotide
gcgucagugcuggcgggaccguccc

SEQ ID NO: 159140 - RNA, 25 nt, Artificial Sequence
  Description of Artificial Sequence: Synthetic oligonucleotide
cuaugagcgaccccccuuugcccag

SEQ ID NO: 159141 - RNA, 25 nt, Artificial Sequence
  Description of Artificial Sequence: Synthetic oligonucleotide
gauugcgcuacagcuaggccgcaug

SEQ ID NO: 159142 - RNA, 25 nt, Artificial Sequence
  Description of Artificial Sequence: Synthetic oligonucleotide
gcuggaagccaggaaggccuaugug

SEQ ID NO: 159143 - RNA, 25 nt, Artificial Sequence
  Description of Artificial Sequence: Synthetic oligonucleotide
gaacaugucgcuguuugagaacuuc

SEQ ID NO: 159144 - RNA, 25 nt, Artificial Sequence
  Description of Artificial Sequence: Synthetic oligonucleotide
cacuuacgcgggcauugaugccaca

SEQ ID NO: 159145 - RNA, 25 nt, Artificial Sequence
  Description of Artificial Sequence: Synthetic oligonucleotide
agcugaggaggccugagcugccauc

SEQ ID NO: 159146 - RNA, 25 nt, Artificial Sequence
  Description of Artificial Sequence: Synthetic oligonucleotide
ccagccagaacguggcucugcuggc

SEQ ID NO: 159147 - RNA, 25 nt, Artificial Sequence
  Description of Artificial Sequence: Synthetic oligonucleotide
ccggagcaaacucugcugucuaacc

SEQ ID NO: 159148 - RNA, 25 nt, Artificial Sequence
  Description of Artificial Sequence: Synthetic oligonucleotide
cugugaccagucugacccuuacagc

SEQ ID NO: 159149 - RNA, 25 nt, Artificial Sequence
  Description of Artificial Sequence: Synthetic oligonucleotide
ccucugacuuaagcugccucaagga

SEQ ID NO: 159150 - RNA, 25 nt, Artificial Sequence
  Description of Artificial Sequence: Synthetic oligonucleotide
aauuuuuuuaacuuaagggagaaaa

SEQ ID NO: 159151 - RNA, 25 nt, Artificial Sequence
  Description of Artificial Sequence: Synthetic oligonucleotide
aaaagggaucuggggaugggguggg

SEQ ID NO: 159152 - RNA, 25 nt, Artificial Sequence
  Description of Artificial Sequence: Synthetic oligonucleotide
gcuuaggggaacuggguucccaugc

SEQ ID NO: 159153 - RNA, 25 nt, Artificial Sequence
  Description of Artificial Sequence: Synthetic oligonucleotide
cuuuguaggugucucauagcuaucc

SEQ ID NO: 159154 - RNA, 25 nt, Artificial Sequence
  Description of Artificial Sequence: Synthetic oligonucleotide
cugggcauccuucuuucuaguucag

SEQ ID NO: 159155 - RNA, 25 nt, Artificial Sequence
  Description of Artificial Sequence: Synthetic oligonucleotide
gcugccccacagguguguuucccau

SEQ ID NO: 159156 - RNA, 25 nt, Artificial Sequence
  Description of Artificial Sequence: Synthetic oligonucleotide
ucccacugcucccccaacacaaacc

SEQ ID NO: 159157 - RNA, 25 nt, Artificial Sequence
  Description of Artificial Sequence: Synthetic oligonucleotide
ccccacuccagcuccuucgcuuaag

SEQ ID NO: 159158 - RNA, 25 nt, Artificial Sequence
  Description of Artificial Sequence: Synthetic oligonucleotide
gccagcacucacaccacuaacaugc

SEQ ID NO: 159159 - RNA, 25 nt, Artificial Sequence
  Description of Artificial Sequence: Synthetic oligonucleotide
cccuguucagcuacucccacucccg

SEQ ID NO: 159160 - RNA, 25 nt, Artificial Sequence
  Description of Artificial Sequence: Synthetic oligonucleotide
ggccugucauucagaaaaaaauaaa

SEQ ID NO: 159161 - RNA, 25 nt, Artificial Sequence
  Description of Artificial Sequence: Synthetic oligonucleotide
auguucuaauaagcuccaaaaaaaa

SEQ ID NO: 159162 - RNA, 4678 nt, Homo sapiens
ugaauugcgagauggauagggcuugagugcccccagcccugcugauaccaaaugccuuuaagauacagccuuucccauccuaaucuacaaaggaaacaggaaaaaggaacuuaaaacucccugugcucagacagaaaugagacuguuacagccugcuucugugcuguuccuucuugccucuaacuuguaaacaagacguaguaggacgaugcuaauggaaagucacaaaccgcuggguuuuugaaaggauccuugggaccucaugcacauuuguggaaacuggauggagagauuuggggaagcauggacucuuuagccagcuuaguucucuguggagucagcuugcuccuuucuggaacuguggaaggugccauggacuugaucuugaucaauucccuaccucuuguaucugaugcugaaacaucucucaccugcauugccucuggguggcgcccccaugagcccaucaccauaggaagggacuuugaagccuuaaugaaccagcaccaggauccgcuggaaguuacucaagaugugaccagagaaugggcuaaaaaaguuguuuggaagagagaaaaggcuaguaagaucaauggugcuuauuucugugaagggcgaguucgaggagaggcaaucaggauacgaaccaugaagaugcgucaacaagcuuccuuccuaccagcuacuuuaacuaugacuguggacaagggagauaacgugaacauaucuuucaaaaagguauugauuaaagaagaagaugcagugauuuacaaaaaugguuccuucauccauucagugccccggcaugaaguaccugauauucuagaaguacaccugccucaugcucagccccaggaugcuggaguguacucggccagguauauaggaggaaaccucuucaccucggccuucaccaggcugauaguccggagaugugaagcccagaaguggggaccugaaugcaaccaucucuguacugcuuguaugaacaauggugucugccaugaagauacuggagaaugcauuugcccuccuggguuuaugggaaggacgugugagaaggcuugugaacugcacacguuuggcagaacuuguaaagaaaggugcaguggacaagagggaugcaagucuuauguguucugucucccugaccccuauggguguuccugugccacaggcuggaagggucugcagugcaaugaagcaugccacccugguuuuuacgggccagauuguaagcuuaggugcagcugcaacaauggggagaugugugaucgcuuccaaggaugucucugcucuccaggauggcaggggcuccagugugagagagaaggcauaccgaggaugaccccaaagauaguggauuugccagaucauauagaaguaaacagugguaaauuuaaucccauuugcaaagcuucuggcuggccgcuaccuacuaaugaagaaaugacccuggugaagccggaugggacagugcuccauccaaaagacuuuaaccauacggaucauuucucaguagccauauucaccauccaccggauccuccccccugacucaggaguuugggucugcagugugaacacaguggcugggaugguggaaaagcccuucaacauuucuguuaaaguucuuccaaagccccugaaugccccaaacgugauugacacuggacauaacuuugcugucaucaacaucagcucugagccuuacuuuggggauggaccaaucaaauccaagaagcuucuauacaaacccguuaaucacuaugaggcuuggcaacauauucaagugacaaaugagauuguuacacucaacuauuuggaaccucggacagaauaugaacucugugugcaacugguccgucguggagaggguggggaagggcauccuggaccugugagacgcuucacaacagcuucuaucggacucccuccuccaagaggucuaaaucuccugccuaaaagucagaccacucuaaauuugaccuggcaaccaauauuuccaagcucggaagaugacuuuuauguugaaguggagagaaggucugugcaaaaaagugaucagcagaauauuaaaguuccaggcaacuugacuucggugcuacuuaacaacuuacaucccagggagcaguacgugguccgagcuagagucaacaccaaggcccagggggaauggagugaagaucucacugcuuggacccuuagugacauucuuccuccucaaccagaaaacaucaagauuuccaacauuacacacuccucagcugugauuucuuggacaauauuggauggcuauucuauuucuucuauuacuauccguuacaagguucaaggcaagaaugaagaccagcacguugaugugaagauaaagaaugccaccaucacucaguaucagcucaagggccuagagccugaaacagcauaccagguggacauuuuugcagagaacaacauagggucaagcaacccagccuuuucucaugaacuggugacccucccagaaucucaagcaccagcggaccucggaggggggaagaugcugcuuauagccauccuuggcucugcuggaaugaccugccugacugugcuguuggccuuucugaucauauugcaauugaagagggcaaaugugcaaaggagaauggcccaagccuuccaaaacgugagggaagaaccagcugugcaguucaacucagggacucuggcccuaaacaggaaggucaaaaacaacccagauccuacaauuuauccagugcuugacuggaaugacaucaaauuucaagaugugauuggggagggcaauuuuggccaaguucuuaaggcgcgcaucaagaaggauggguuacggauggaugcugccaucaaaagaaugaaagaauaugccuccaaagaugaucacagggacuuugcaggagaacuggaaguucuuuguaaacuuggacaccauccaaacaucaucaaucucuuaggagcaugugaacaucgaggcuacuuguaccuggccauugaguacgcgccccauggaaaccuucuggacuuccuucgcaagagccgugugcuggagacggacccagcauuugccauugccaauagcaccgcguccacacuguccucccagcagcuccuucacuucgcugccgacguggcccggggcauggacuacuugagccaaaaacaguuuauccacagggaucuggcugccagaaacauuuuaguuggugaaaacuauguggcaaaaauagcagauuuuggauugucccgaggucaagagguguaugugaaaaagacaaugggaaggcucccagugcgcuggauggccaucgagucacugaauuacaguguguacacaaccaacagugauguaugguccuaugguguguuacuaugggagauuguuagcuuaggaggcacacccuacugcgggaugacuugugcagaacucuacgagaagcugccccagggcuacagacuggagaagccccugaacugugaugaugagguguaugaucuaaugagacaaugcuggcgggagaagccuuaugagaggccaucauuugcccagauauugguguccuuaaacagaauguuagaggagcgaaagaccuacgugaauaccacgcuuuaugagaaguuuacuuaugcaggaauugacuguucugcugaagaagcggccuaggacagaacaucuguauacccucuguuucccuuucacuggcaugggagacccuugacaccugcugagaaaacaugccucugccaaaggaugugauauauaaguguacauaugugcuguacaccugggaccuucaccacuguagaucccaugcauggaucuauguaguaugcucugacucuaauaggacuguauauacuguuuuaagaaugggcugaaaucagaaugccuguuugugguuucauaugcaauaauauauuuuuuuaaaaauguggacuucauaggaaggcgugaguacaauuaguauaaugcauaacucauuguuguccuagauauuuugauauuuaccuuuauguugaaugcuauuaaauguuuuccugugucaaaguaaaauauuguuaauaaaccuaacaaugacccugauaguacagguuaagugagagaacuauaugaauucuaacaagucauagguuaauauuuaagacacugaaaaaucuaagugauauaaaucagauucuucucucucaauuuuaucccucaccuguagcagccagucccguuucauuuagucaugugaccacucugucuuguguuuccacagccugcaagucaguccaggaugcuaacaucuaaaaauagacuuaaaucucauugcuuacaagccuaagaaucuuuagagaaguauacauaaguuuaggauaaaauaaugggauuuucuuuucuuuucucugguaauauugacuuguauauuuuaagaaauaacagaaagccugggugacauuugggagacaugugacauuuauauauugaauuaauaucccuacauguauugcacauuguaaaaaguuuuaguuuugaugaguugugaguuuaccuuguauacuguaggcacacuuugcacugauauaucaugagugaauaaaugucuugccuacucacgucucaaaaaaaaaaaaaaaaaaaaaaaaaaaaaaaaaaaaaaaaaaaaaaaaaaaaaaaaaaa

SEQ ID NO: 159163 - RNA, 19 nt, Artificial Sequence
  Description of Artificial Sequence: Synthetic oligonucleotide
ugaauugcgagauggauag

SEQ ID NO: 159164 - RNA, 19 nt, Artificial Sequence
  Description of Artificial Sequence: Synthetic oligonucleotide
gggcuugagugcccccagc

SEQ ID NO: 159165 - RNA, 19 nt, Artificial Sequence
  Description of Artificial Sequence: Synthetic oligonucleotide
cccugcugauaccaaaugc

SEQ ID NO: 159166 - RNA, 19 nt, Artificial Sequence
  Description of Artificial Sequence: Synthetic oligonucleotide
ccuuuaagauacagccuuu

SEQ ID NO: 159167 - RNA, 19 nt, Artificial Sequence
  Description of Artificial Sequence: Synthetic oligonucleotide
ucccauccuaaucuacaaa

SEQ ID NO: 159168 - RNA, 19 nt, Artificial Sequence
  Description of Artificial Sequence: Synthetic oligonucleotide
aggaaacaggaaaaaggaa

SEQ ID NO: 159169 - RNA, 19 nt, Artificial Sequence
  Description of Artificial Sequence: Synthetic oligonucleotide
acuuaaaacucccugugcu

SEQ ID NO: 159170 - RNA, 19 nt, Artificial Sequence
  Description of Artificial Sequence: Synthetic oligonucleotide
ucagacagaaaugagacug

SEQ ID NO: 159171 - RNA, 19 nt, Artificial Sequence
  Description of Artificial Sequence: Synthetic oligonucleotide
guuacagccugcuucugug

SEQ ID NO: 159172 - RNA, 19 nt, Artificial Sequence
  Description of Artificial Sequence: Synthetic oligonucleotide
gcuguuccuucuugccucu

SEQ ID NO: 159173 - RNA, 19 nt, Artificial Sequence
  Description of Artificial Sequence: Synthetic oligonucleotide
uaacuuguaaacaagacgu

SEQ ID NO: 159174 - RNA, 19 nt, Artificial Sequence
  Description of Artificial Sequence: Synthetic oligonucleotide
uaguaggacgaugcuaaug

SEQ ID NO: 159175 - RNA, 19 nt, Artificial Sequence
  Description of Artificial Sequence: Synthetic oligonucleotide
ggaaagucacaaaccgcug

SEQ ID NO: 159176 - RNA, 19 nt, Artificial Sequence
  Description of Artificial Sequence: Synthetic oligonucleotide
ggguuuuugaaaggauccu

SEQ ID NO: 159177 - RNA, 19 nt, Artificial Sequence
  Description of Artificial Sequence: Synthetic oligonucleotide
uugggaccucaugcacauu

SEQ ID NO: 159178 - RNA, 19 nt, Artificial Sequence
  Description of Artificial Sequence: Synthetic oligonucleotide
uuguggaaacuggauggag

SEQ ID NO: 159179 - RNA, 19 nt, Artificial Sequence
  Description of Artificial Sequence: Synthetic oligonucleotide
gagauuuggggaagcaugg

SEQ ID NO: 159180 - RNA, 19 nt, Artificial Sequence
  Description of Artificial Sequence: Synthetic oligonucleotide
gacucuuuagccagcuuag

SEQ ID NO: 159181 - RNA, 19 nt, Artificial Sequence
  Description of Artificial Sequence: Synthetic oligonucleotide
guucucuguggagucagcu

SEQ ID NO: 159182 - RNA, 19 nt, Artificial Sequence
  Description of Artificial Sequence: Synthetic oligonucleotide
uugcuccuuucuggaacug

SEQ ID NO: 159183 - RNA, 19 nt, Artificial Sequence
  Description of Artificial Sequence: Synthetic oligonucleotide
guggaaggugccauggacu

SEQ ID NO: 159184 - RNA, 19 nt, Artificial Sequence
  Description of Artificial Sequence: Synthetic oligonucleotide
uugaucuugaucaauuccc

SEQ ID NO: 159185 - RNA, 19 nt, Artificial Sequence
  Description of Artificial Sequence: Synthetic oligonucleotide
cuaccucuuguaucugaug

SEQ ID NO: 159186 - RNA, 19 nt, Artificial Sequence
  Description of Artificial Sequence: Synthetic oligonucleotide
gcugaaacaucucucaccu

SEQ ID NO: 159187 - RNA, 19 nt, Artificial Sequence
  Description of Artificial Sequence: Synthetic oligonucleotide
ugcauugccucuggguggc

SEQ ID NO: 159188 - RNA, 19 nt, Artificial Sequence
  Description of Artificial Sequence: Synthetic oligonucleotide
cgcccccaugagcccauca

SEQ ID NO: 159189 - RNA, 19 nt, Artificial Sequence
  Description of Artificial Sequence: Synthetic oligonucleotide
accauaggaagggacuuug

SEQ ID NO: 159190 - RNA, 19 nt, Artificial Sequence
  Description of Artificial Sequence: Synthetic oligonucleotide
gaagccuuaaugaaccagc

SEQ ID NO: 159191 - RNA, 19 nt, Artificial Sequence
  Description of Artificial Sequence: Synthetic oligonucleotide
caccaggauccgcuggaag

SEQ ID NO: 159192 - RNA, 19 nt, Artificial Sequence
  Description of Artificial Sequence: Synthetic oligonucleotide
guuacucaagaugugacca

SEQ ID NO: 159193 - RNA, 19 nt, Artificial Sequence
  Description of Artificial Sequence: Synthetic oligonucleotide
agagaaugggcuaaaaaag

SEQ ID NO: 159194 - RNA, 19 nt, Artificial Sequence
  Description of Artificial Sequence: Synthetic oligonucleotide
guuguuuggaagagagaaa

SEQ ID NO: 159195 - RNA, 19 nt, Artificial Sequence
  Description of Artificial Sequence: Synthetic oligonucleotide
aaggcuaguaagaucaaug

SEQ ID NO: 159196 - RNA, 19 nt, Artificial Sequence
  Description of Artificial Sequence: Synthetic oligonucleotide
ggugcuuauuucugugaag

SEQ ID NO: 159197 - RNA, 19 nt, Artificial Sequence
  Description of Artificial Sequence: Synthetic oligonucleotide
gggcgaguucgaggagagg

SEQ ID NO: 159198 - RNA, 19 nt, Artificial Sequence
  Description of Artificial Sequence: Synthetic oligonucleotide
gcaaucaggauacgaacca

SEQ ID NO: 159199 - RNA, 19 nt, Artificial Sequence
  Description of Artificial Sequence: Synthetic oligonucleotide
augaagaugcgucaacaag

SEQ ID NO: 159200 - RNA, 19 nt, Artificial Sequence
  Description of Artificial Sequence: Synthetic oligonucleotide
gcuuccuuccuaccagcua

SEQ ID NO: 159201 - RNA, 19 nt, Artificial Sequence
  Description of Artificial Sequence: Synthetic oligonucleotide
acuuuaacuaugacugugg

SEQ ID NO: 159202 - RNA, 19 nt, Artificial Sequence
  Description of Artificial Sequence: Synthetic oligonucleotide
gacaagggagauaacguga

SEQ ID NO: 159203 - RNA, 19 nt, Artificial Sequence
  Description of Artificial Sequence: Synthetic oligonucleotide
aacauaucuuucaaaaagg

SEQ ID NO: 159204 - RNA, 19 nt, Artificial Sequence
  Description of Artificial Sequence: Synthetic oligonucleotide
guauugauuaaagaagaag

SEQ ID NO: 159205 - RNA, 19 nt, Artificial Sequence
  Description of Artificial Sequence: Synthetic oligonucleotide
gaugcagugauuuacaaaa

SEQ ID NO: 159206 - RNA, 19 nt, Artificial Sequence
  Description of Artificial Sequence: Synthetic oligonucleotide
aaugguuccuucauccauu

SEQ ID NO: 159207 - RNA, 19 nt, Artificial Sequence
  Description of Artificial Sequence: Synthetic oligonucleotide
ucagugccccggcaugaag

SEQ ID NO: 159208 - RNA, 19 nt, Artificial Sequence
  Description of Artificial Sequence: Synthetic oligonucleotide
guaccugauauucuagaag

SEQ ID NO: 159209 - RNA, 19 nt, Artificial Sequence
  Description of Artificial Sequence: Synthetic oligonucleotide
guacaccugccucaugcuc

SEQ ID NO: 159210 - RNA, 19 nt, Artificial Sequence
  Description of Artificial Sequence: Synthetic oligonucleotide
cagccccaggaugcuggag

SEQ ID NO: 159211 - RNA, 19 nt, Artificial Sequence
  Description of Artificial Sequence: Synthetic oligonucleotide
guguacucggccagguaua

SEQ ID NO: 159212 - RNA, 19 nt, Artificial Sequence
  Description of Artificial Sequence: Synthetic oligonucleotide
auaggaggaaaccucuuca

SEQ ID NO: 159213 - RNA, 19 nt, Artificial Sequence
  Description of Artificial Sequence: Synthetic oligonucleotide
accucggccuucaccaggc

SEQ ID NO: 159214 - RNA, 19 nt, Artificial Sequence
  Description of Artificial Sequence: Synthetic oligonucleotide
cugauaguccggagaugug

SEQ ID NO: 159215 - RNA, 19 nt, Artificial Sequence
  Description of Artificial Sequence: Synthetic oligonucleotide
gaagcccagaaguggggac

SEQ ID NO: 159216 - RNA, 19 nt, Artificial Sequence
  Description of Artificial Sequence: Synthetic oligonucleotide
ccugaaugcaaccaucucu

SEQ ID NO: 159217 - RNA, 19 nt, Artificial Sequence
  Description of Artificial Sequence: Synthetic oligonucleotide
uguacugcuuguaugaaca

SEQ ID NO: 159218 - RNA, 19 nt, Artificial Sequence
  Description of Artificial Sequence: Synthetic oligonucleotide
aauggugucugccaugaag

SEQ ID NO: 159219 - RNA, 19 nt, Artificial Sequence
  Description of Artificial Sequence: Synthetic oligonucleotide
gauacuggagaaugcauuu

SEQ ID NO: 159220 - RNA, 19 nt, Artificial Sequence
  Description of Artificial Sequence: Synthetic oligonucleotide
ugcccuccuggguuuaugg

SEQ ID NO: 159221 - RNA, 19 nt, Artificial Sequence
  Description of Artificial Sequence: Synthetic oligonucleotide
ggaaggacgugugagaagg

SEQ ID NO: 159222 - RNA, 19 nt, Artificial Sequence
  Description of Artificial Sequence: Synthetic oligonucleotide
gcuugugaacugcacacgu

SEQ ID NO: 159223 - RNA, 19 nt, Artificial Sequence
  Description of Artificial Sequence: Synthetic oligonucleotide
uuuggcagaacuuguaaag

SEQ ID NO: 159224 - RNA, 19 nt, Artificial Sequence
  Description of Artificial Sequence: Synthetic oligonucleotide
gaaaggugcaguggacaag

SEQ ID NO: 159225 - RNA, 19 nt, Artificial Sequence
  Description of Artificial Sequence: Synthetic oligonucleotide
gagggaugcaagucuuaug

SEQ ID NO: 159226 - RNA, 19 nt, Artificial Sequence
  Description of Artificial Sequence: Synthetic oligonucleotide
guguucugucucccugacc

SEQ ID NO: 159227 - RNA, 19 nt, Artificial Sequence
  Description of Artificial Sequence: Synthetic oligonucleotide
cccuauggguguuccugug

SEQ ID NO: 159228 - RNA, 19 nt, Artificial Sequence
  Description of Artificial Sequence: Synthetic oligonucleotide
gccacaggcuggaaggguc

SEQ ID NO: 159229 - RNA, 19 nt, Artificial Sequence
  Description of Artificial Sequence: Synthetic oligonucleotide
cugcagugcaaugaagcau

SEQ ID NO: 159230 - RNA, 19 nt, Artificial Sequence
  Description of Artificial Sequence: Synthetic oligonucleotide
ugccacccugguuuuuacg

SEQ ID NO: 159231 - RNA, 19 nt, Artificial Sequence
  Description of Artificial Sequence: Synthetic oligonucleotide
gggccagauuguaagcuua

SEQ ID NO: 159232 - RNA, 19 nt, Artificial Sequence
  Description of Artificial Sequence: Synthetic oligonucleotide
aggugcagcugcaacaaug

SEQ ID NO: 159233 - RNA, 19 nt, Artificial Sequence
  Description of Artificial Sequence: Synthetic oligonucleotide
ggggagaugugugaucgcu

SEQ ID NO: 159234 - RNA, 19 nt, Artificial Sequence
  Description of Artificial Sequence: Synthetic oligonucleotide
uuccaaggaugucucugcu

SEQ ID NO: 159235 - RNA, 19 nt, Artificial Sequence
  Description of Artificial Sequence: Synthetic oligonucleotide
ucuccaggauggcaggggc

SEQ ID NO: 159236 - RNA, 19 nt, Artificial Sequence
  Description of Artificial Sequence: Synthetic oligonucleotide
cuccagugugagagagaag

SEQ ID NO: 159237 - RNA, 19 nt, Artificial Sequence
  Description of Artificial Sequence: Synthetic oligonucleotide
ggcauaccgaggaugaccc

SEQ ID NO: 159238 - RNA, 19 nt, Artificial Sequence
  Description of Artificial Sequence: Synthetic oligonucleotide
ccaaagauaguggauuugc

SEQ ID NO: 159239 - RNA, 19 nt, Artificial Sequence
  Description of Artificial Sequence: Synthetic oligonucleotide
ccagaucauauagaaguaa

SEQ ID NO: 159240 - RNA, 19 nt, Artificial Sequence
  Description of Artificial Sequence: Synthetic oligonucleotide
aacagugguaaauuuaauc

SEQ ID NO: 159241 - RNA, 19 nt, Artificial Sequence
  Description of Artificial Sequence: Synthetic oligonucleotide
cccauuugcaaagcuucug

SEQ ID NO: 159242 - RNA, 19 nt, Artificial Sequence
  Description of Artificial Sequence: Synthetic oligonucleotide
ggcuggccgcuaccuacua

SEQ ID NO: 159243 - RNA, 19 nt, Artificial Sequence
  Description of Artificial Sequence: Synthetic oligonucleotide
aaugaagaaaugacccugg

SEQ ID NO: 159244 - RNA, 19 nt, Artificial Sequence
  Description of Artificial Sequence: Synthetic oligonucleotide
gugaagccggaugggacag

SEQ ID NO: 159245 - RNA, 19 nt, Artificial Sequence
  Description of Artificial Sequence: Synthetic oligonucleotide
gugcuccauccaaaagacu

SEQ ID NO: 159246 - RNA, 19 nt, Artificial Sequence
  Description of Artificial Sequence: Synthetic oligonucleotide
uuuaaccauacggaucauu

SEQ ID NO: 159247 - RNA, 19 nt, Artificial Sequence
  Description of Artificial Sequence: Synthetic oligonucleotide
uucucaguagccauauuca

SEQ ID NO: 159248 - RNA, 19 nt, Artificial Sequence
  Description of Artificial Sequence: Synthetic oligonucleotide
accauccaccggauccucc

SEQ ID NO: 159249 - RNA, 19 nt, Artificial Sequence
  Description of Artificial Sequence: Synthetic oligonucleotide
cccccugacucaggaguuu

SEQ ID NO: 159250 - RNA, 19 nt, Artificial Sequence
  Description of Artificial Sequence: Synthetic oligonucleotide
ugggucugcagugugaaca

SEQ ID NO: 159251 - RNA, 19 nt, Artificial Sequence
  Description of Artificial Sequence: Synthetic oligonucleotide
acaguggcugggauggugg

SEQ ID NO: 159252 - RNA, 19 nt, Artificial Sequence
  Description of Artificial Sequence: Synthetic oligonucleotide
gaaaagcccuucaacauuu

SEQ ID NO: 159253 - RNA, 19 nt, Artificial Sequence
  Description of Artificial Sequence: Synthetic oligonucleotide
ucuguuaaaguucuuccaa

SEQ ID NO: 159254 - RNA, 19 nt, Artificial Sequence
  Description of Artificial Sequence: Synthetic oligonucleotide
aagccccugaaugccccaa

SEQ ID NO: 159255 - RNA, 19 nt, Artificial Sequence
  Description of Artificial Sequence: Synthetic oligonucleotide
aacgugauugacacuggac

SEQ ID NO: 159256 - RNA, 19 nt, Artificial Sequence
  Description of Artificial Sequence: Synthetic oligonucleotide
cauaacuuugcugucauca

SEQ ID NO: 159257 - RNA, 19 nt, Artificial Sequence
  Description of Artificial Sequence: Synthetic oligonucleotide
aacaucagcucugagccuu

SEQ ID NO: 159258 - RNA, 19 nt, Artificial Sequence
  Description of Artificial Sequence: Synthetic oligonucleotide
uacuuuggggauggaccaa

SEQ ID NO: 159259 - RNA, 19 nt, Artificial Sequence
  Description of Artificial Sequence: Synthetic oligonucleotide
aucaaauccaagaagcuuc

SEQ ID NO: 159260 - RNA, 19 nt, Artificial Sequence
  Description of Artificial Sequence: Synthetic oligonucleotide
cuauacaaacccguuaauc

SEQ ID NO: 159261 - RNA, 19 nt, Artificial Sequence
  Description of Artificial Sequence: Synthetic oligonucleotide
cacuaugaggcuuggcaac

SEQ ID NO: 159262 - RNA, 19 nt, Artificial Sequence
  Description of Artificial Sequence: Synthetic oligonucleotide
cauauucaagugacaaaug

SEQ ID NO: 159263 - RNA, 19 nt, Artificial Sequence
  Description of Artificial Sequence: Synthetic oligonucleotide
gagauuguuacacucaacu

SEQ ID NO: 159264 - RNA, 19 nt, Artificial Sequence
  Description of Artificial Sequence: Synthetic oligonucleotide
uauuuggaaccucggacag

SEQ ID NO: 159265 - RNA, 19 nt, Artificial Sequence
  Description of Artificial Sequence: Synthetic oligonucleotide
gaauaugaacucugugugc

SEQ ID NO: 159266 - RNA, 19 nt, Artificial Sequence
  Description of Artificial Sequence: Synthetic oligonucleotide
caacugguccgucguggag

SEQ ID NO: 159267 - RNA, 19 nt, Artificial Sequence
  Description of Artificial Sequence: Synthetic oligonucleotide
gaggguggggaagggcauc

SEQ ID NO: 159268 - RNA, 19 nt, Artificial Sequence
  Description of Artificial Sequence: Synthetic oligonucleotide
ccuggaccugugagacgcu

SEQ ID NO: 159269 - RNA, 19 nt, Artificial Sequence
  Description of Artificial Sequence: Synthetic oligonucleotide
uucacaacagcuucuaucg

SEQ ID NO: 159270 - RNA, 19 nt, Artificial Sequence
  Description of Artificial Sequence: Synthetic oligonucleotide
ggacucccuccuccaagag

SEQ ID NO: 159271 - RNA, 19 nt, Artificial Sequence
  Description of Artificial Sequence: Synthetic oligonucleotide
ggucuaaaucuccugccua

SEQ ID NO: 159272 - RNA, 19 nt, Artificial Sequence
  Description of Artificial Sequence: Synthetic oligonucleotide
aaaagucagaccacucuaa

SEQ ID NO: 159273 - RNA, 19 nt, Artificial Sequence
  Description of Artificial Sequence: Synthetic oligonucleotide
aauuugaccuggcaaccaa

SEQ ID NO: 159274 - RNA, 19 nt, Artificial Sequence
  Description of Artificial Sequence: Synthetic oligonucleotide
auauuuccaagcucggaag

SEQ ID NO: 159275 - RNA, 19 nt, Artificial Sequence
  Description of Artificial Sequence: Synthetic oligonucleotide
gaugacuuuuauguugaag

SEQ ID NO: 159276 - RNA, 19 nt, Artificial Sequence
  Description of Artificial Sequence: Synthetic oligonucleotide
guggagagaaggucugugc

SEQ ID NO: 159277 - RNA, 19 nt, Artificial Sequence
  Description of Artificial Sequence: Synthetic oligonucleotide
caaaaaagugaucagcaga

SEQ ID NO: 159278 - RNA, 19 nt, Artificial Sequence
  Description of Artificial Sequence: Synthetic oligonucleotide
aauauuaaaguuccaggca

SEQ ID NO: 159279 - RNA, 19 nt, Artificial Sequence
  Description of Artificial Sequence: Synthetic oligonucleotide
aacuugacuucggugcuac

SEQ ID NO: 159280 - RNA, 19 nt, Artificial Sequence
  Description of Artificial Sequence: Synthetic oligonucleotide
cuuaacaacuuacauccca

SEQ ID NO: 159281 - RNA, 19 nt, Artificial Sequence
  Description of Artificial Sequence: Synthetic oligonucleotide
agggagcaguacguggucc

SEQ ID NO: 159282 - RNA, 19 nt, Artificial Sequence
  Description of Artificial Sequence: Synthetic oligonucleotide
cgagcuagagucaacacca

SEQ ID NO: 159283 - RNA, 19 nt, Artificial Sequence
  Description of Artificial Sequence: Synthetic oligonucleotide
aaggcccagggggaaugga

SEQ ID NO: 159284 - RNA, 19 nt, Artificial Sequence
  Description of Artificial Sequence: Synthetic oligonucleotide
agugaagaucucacugcuu

SEQ ID NO: 159285 - RNA, 19 nt, Artificial Sequence
  Description of Artificial Sequence: Synthetic oligonucleotide
uggacccuuagugacauuc

SEQ ID NO: 159286 - RNA, 19 nt, Artificial Sequence
  Description of Artificial Sequence: Synthetic oligonucleotide
cuuccuccucaaccagaaa

SEQ ID NO: 159287 - RNA, 19 nt, Artificial Sequence
  Description of Artificial Sequence: Synthetic oligonucleotide
aacaucaagauuuccaaca

SEQ ID NO: 159288 - RNA, 19 nt, Artificial Sequence
  Description of Artificial Sequence: Synthetic oligonucleotide
auuacacacuccucagcug

SEQ ID NO: 159289 - RNA, 19 nt, Artificial Sequence
  Description of Artificial Sequence: Synthetic oligonucleotide
gugauuucuuggacaauau

SEQ ID NO: 159290 - RNA, 19 nt, Artificial Sequence
  Description of Artificial Sequence: Synthetic oligonucleotide
uuggauggcuauucuauuu

SEQ ID NO: 159291 - RNA, 19 nt, Artificial Sequence
  Description of Artificial Sequence: Synthetic oligonucleotide
ucuucuauuacuauccguu

SEQ ID NO: 159292 - RNA, 19 nt, Artificial Sequence
  Description of Artificial Sequence: Synthetic oligonucleotide
uacaagguucaaggcaaga

SEQ ID NO: 159293 - RNA, 19 nt, Artificial Sequence
  Description of Artificial Sequence: Synthetic oligonucleotide
aaugaagaccagcacguug

SEQ ID NO: 159294 - RNA, 19 nt, Artificial Sequence
  Description of Artificial Sequence: Synthetic oligonucleotide
gaugugaagauaaagaaug

SEQ ID NO: 159295 - RNA, 19 nt, Artificial Sequence
  Description of Artificial Sequence: Synthetic oligonucleotide
gccaccaucacucaguauc

SEQ ID NO: 159296 - RNA, 19 nt, Artificial Sequence
  Description of Artificial Sequence: Synthetic oligonucleotide
cagcucaagggccuagagc

SEQ ID NO: 159297 - RNA, 19 nt, Artificial Sequence
  Description of Artificial Sequence: Synthetic oligonucleotide
ccugaaacagcauaccagg

SEQ ID NO: 159298 - RNA, 19 nt, Artificial Sequence
  Description of Artificial Sequence: Synthetic oligonucleotide
guggacauuuuugcagaga

SEQ ID NO: 159299 - RNA, 19 nt, Artificial Sequence
  Description of Artificial Sequence: Synthetic oligonucleotide
aacaacauagggucaagca

SEQ ID NO: 159300 - RNA, 19 nt, Artificial Sequence
  Description of Artificial Sequence: Synthetic oligonucleotide
aacccagccuuuucucaug

SEQ ID NO: 159301 - RNA, 19 nt, Artificial Sequence
  Description of Artificial Sequence: Synthetic oligonucleotide
gaacuggugacccucccag

SEQ ID NO: 159302 - RNA, 19 nt, Artificial Sequence
  Description of Artificial Sequence: Synthetic oligonucleotide
gaaucucaagcaccagcgg

SEQ ID NO: 159303 - RNA, 19 nt, Artificial Sequence
  Description of Artificial Sequence: Synthetic oligonucleotide
gaccucggaggggggaaga

SEQ ID NO: 159304 - RNA, 19 nt, Artificial Sequence
  Description of Artificial Sequence: Synthetic oligonucleotide
augcugcuuauagccaucc

SEQ ID NO: 159305 - RNA, 19 nt, Artificial Sequence
  Description of Artificial Sequence: Synthetic oligonucleotide
cuuggcucugcuggaauga

SEQ ID NO: 159306 - RNA, 19 nt, Artificial Sequence
  Description of Artificial Sequence: Synthetic oligonucleotide
accugccugacugugcugu

SEQ ID NO: 159307 - RNA, 19 nt, Artificial Sequence
  Description of Artificial Sequence: Synthetic oligonucleotide
uuggccuuucugaucauau

SEQ ID NO: 159308 - RNA, 19 nt, Artificial Sequence
  Description of Artificial Sequence: Synthetic oligonucleotide
uugcaauugaagagggcaa

SEQ ID NO: 159309 - RNA, 19 nt, Artificial Sequence
  Description of Artificial Sequence: Synthetic oligonucleotide
aaugugcaaaggagaaugg

SEQ ID NO: 159310 - RNA, 19 nt, Artificial Sequence
  Description of Artificial Sequence: Synthetic oligonucleotide
gcccaagccuuccaaaacg

SEQ ID NO: 159311 - RNA, 19 nt, Artificial Sequence
  Description of Artificial Sequence: Synthetic oligonucleotide
gugagggaagaaccagcug

SEQ ID NO: 159312 - RNA, 19 nt, Artificial Sequence
  Description of Artificial Sequence: Synthetic oligonucleotide
gugcaguucaacucaggga

SEQ ID NO: 159313 - RNA, 19 nt, Artificial Sequence
  Description of Artificial Sequence: Synthetic oligonucleotide
acucuggcccuaaacagga

SEQ ID NO: 159314 - RNA, 19 nt, Artificial Sequence
  Description of Artificial Sequence: Synthetic oligonucleotide
aaggucaaaaacaacccag

SEQ ID NO: 159315 - RNA, 19 nt, Artificial Sequence
  Description of Artificial Sequence: Synthetic oligonucleotide
gauccuacaauuuauccag

SEQ ID NO: 159316 - RNA, 19 nt, Artificial Sequence
  Description of Artificial Sequence: Synthetic oligonucleotide
gugcuugacuggaaugaca

SEQ ID NO: 159317 - RNA, 19 nt, Artificial Sequence
  Description of Artificial Sequence: Synthetic oligonucleotide
aucaaauuucaagauguga

SEQ ID NO: 159318 - RNA, 19 nt, Artificial Sequence
  Description of Artificial Sequence: Synthetic oligonucleotide
auuggggagggcaauuuug

SEQ ID NO: 159319 - RNA, 19 nt, Artificial Sequence
  Description of Artificial Sequence: Synthetic oligonucleotide
ggccaaguucuuaaggcgc

SEQ ID NO: 159320 - RNA, 19 nt, Artificial Sequence
  Description of Artificial Sequence: Synthetic oligonucleotide
cgcaucaagaaggaugggu

SEQ ID NO: 159321 - RNA, 19 nt, Artificial Sequence
  Description of Artificial Sequence: Synthetic oligonucleotide
uuacggauggaugcugcca

SEQ ID NO: 159322 - RNA, 19 nt, Artificial Sequence
  Description of Artificial Sequence: Synthetic oligonucleotide
aucaaaagaaugaaagaau

SEQ ID NO: 159323 - RNA, 19 nt, Artificial Sequence
  Description of Artificial Sequence: Synthetic oligonucleotide
uaugccuccaaagaugauc

SEQ ID NO: 159324 - RNA, 19 nt, Artificial Sequence
  Description of Artificial Sequence: Synthetic oligonucleotide
cacagggacuuugcaggag

SEQ ID NO: 159325 - RNA, 19 nt, Artificial Sequence
  Description of Artificial Sequence: Synthetic oligonucleotide
gaacuggaaguucuuugua

SEQ ID NO: 159326 - RNA, 19 nt, Artificial Sequence
  Description of Artificial Sequence: Synthetic oligonucleotide
aaacuuggacaccauccaa

SEQ ID NO: 159327 - RNA, 19 nt, Artificial Sequence
  Description of Artificial Sequence: Synthetic oligonucleotide
aacaucaucaaucucuuag

SEQ ID NO: 159328 - RNA, 19 nt, Artificial Sequence
  Description of Artificial Sequence: Synthetic oligonucleotide
ggagcaugugaacaucgag

SEQ ID NO: 159329 - RNA, 19 nt, Artificial Sequence
  Description of Artificial Sequence: Synthetic oligonucleotide
ggcuacuuguaccuggcca

SEQ ID NO: 159330 - RNA, 19 nt, Artificial Sequence
  Description of Artificial Sequence: Synthetic oligonucleotide
auugaguacgcgccccaug

SEQ ID NO: 159331 - RNA, 19 nt, Artificial Sequence
  Description of Artificial Sequence: Synthetic oligonucleotide
ggaaaccuucuggacuucc

SEQ ID NO: 159332 - RNA, 19 nt, Artificial Sequence
  Description of Artificial Sequence: Synthetic oligonucleotide
cuucgcaagagccgugugc

SEQ ID NO: 159333 - RNA, 19 nt, Artificial Sequence
  Description of Artificial Sequence: Synthetic oligonucleotide
cuggagacggacccagcau

SEQ ID NO: 159334 - RNA, 19 nt, Artificial Sequence
  Description of Artificial Sequence: Synthetic oligonucleotide
uuugccauugccaauagca

SEQ ID NO: 159335 - RNA, 19 nt, Artificial Sequence
  Description of Artificial Sequence: Synthetic oligonucleotide
accgcguccacacuguccu

SEQ ID NO: 159336 - RNA, 19 nt, Artificial Sequence
  Description of Artificial Sequence: Synthetic oligonucleotide
ucccagcagcuccuucacu

SEQ ID NO: 159337 - RNA, 19 nt, Artificial Sequence
  Description of Artificial Sequence: Synthetic oligonucleotide
uucgcugccgacguggccc

SEQ ID NO: 159338 - RNA, 19 nt, Artificial Sequence
  Description of Artificial Sequence: Synthetic oligonucleotide
cggggcauggacuacuuga

SEQ ID NO: 159339 - RNA, 19 nt, Artificial Sequence
  Description of Artificial Sequence: Synthetic oligonucleotide
agccaaaaacaguuuaucc

SEQ ID NO: 159340 - RNA, 19 nt, Artificial Sequence
  Description of Artificial Sequence: Synthetic oligonucleotide
cacagggaucuggcugcca

SEQ ID NO: 159341 - RNA, 19 nt, Artificial Sequence
  Description of Artificial Sequence: Synthetic oligonucleotide
agaaacauuuuaguuggug

SEQ ID NO: 159342 - RNA, 19 nt, Artificial Sequence
  Description of Artificial Sequence: Synthetic oligonucleotide
gaaaacuauguggcaaaaa

SEQ ID NO: 159343 - RNA, 19 nt, Artificial Sequence
  Description of Artificial Sequence: Synthetic oligonucleotide
auagcagauuuuggauugu

SEQ ID NO: 159344 - RNA, 19 nt, Artificial Sequence
  Description of Artificial Sequence: Synthetic oligonucleotide
ucccgaggucaagaggugu

SEQ ID NO: 159345 - RNA, 19 nt, Artificial Sequence
  Description of Artificial Sequence: Synthetic oligonucleotide
uaugugaaaaagacaaugg

SEQ ID NO: 159346 - RNA, 19 nt, Artificial Sequence
  Description of Artificial Sequence: Synthetic oligonucleotide
ggaaggcucccagugcgcu

SEQ ID NO: 159347 - RNA, 19 nt, Artificial Sequence
  Description of Artificial Sequence: Synthetic oligonucleotide
uggauggccaucgagucac

SEQ ID NO: 159348 - RNA, 19 nt, Artificial Sequence
  Description of Artificial Sequence: Synthetic oligonucleotide
cugaauuacaguguguaca

SEQ ID NO: 159349 - RNA, 19 nt, Artificial Sequence
  Description of Artificial Sequence: Synthetic oligonucleotide
acaaccaacagugauguau

SEQ ID NO: 159350 - RNA, 19 nt, Artificial Sequence
  Description of Artificial Sequence: Synthetic oligonucleotide
ugguccuaugguguguuac

SEQ ID NO: 159351 - RNA, 19 nt, Artificial Sequence
  Description of Artificial Sequence: Synthetic oligonucleotide
cuaugggagauuguuagcu

SEQ ID NO: 159352 - RNA, 19 nt, Artificial Sequence
  Description of Artificial Sequence: Synthetic oligonucleotide
uuaggaggcacacccuacu

SEQ ID NO: 159353 - RNA, 19 nt, Artificial Sequence
  Description of Artificial Sequence: Synthetic oligonucleotide
ugcgggaugacuugugcag

SEQ ID NO: 159354 - RNA, 19 nt, Artificial Sequence
  Description of Artificial Sequence: Synthetic oligonucleotide
gaacucuacgagaagcugc

SEQ ID NO: 159355 - RNA, 19 nt, Artificial Sequence
  Description of Artificial Sequence: Synthetic oligonucleotide
ccccagggcuacagacugg

SEQ ID NO: 159356 - RNA, 19 nt, Artificial Sequence
  Description of Artificial Sequence: Synthetic oligonucleotide
gagaagccccugaacugug

SEQ ID NO: 159357 - RNA, 19 nt, Artificial Sequence
  Description of Artificial Sequence: Synthetic oligonucleotide
gaugaugagguguaugauc

SEQ ID NO: 159358 - RNA, 19 nt, Artificial Sequence
  Description of Artificial Sequence: Synthetic oligonucleotide
cuaaugagacaaugcuggc

SEQ ID NO: 159359 - RNA, 19 nt, Artificial Sequence
  Description of Artificial Sequence: Synthetic oligonucleotide
cgggagaagccuuaugaga

SEQ ID NO: 159360 - RNA, 19 nt, Artificial Sequence
  Description of Artificial Sequence: Synthetic oligonucleotide
aggccaucauuugcccaga

SEQ ID NO: 159361 - RNA, 19 nt, Artificial Sequence
  Description of Artificial Sequence: Synthetic oligonucleotide
auauugguguccuuaaaca

SEQ ID NO: 159362 - RNA, 19 nt, Artificial Sequence
  Description of Artificial Sequence: Synthetic oligonucleotide
agaauguuagaggagcgaa

SEQ ID NO: 159363 - RNA, 19 nt, Artificial Sequence
  Description of Artificial Sequence: Synthetic oligonucleotide
aagaccuacgugaauacca

SEQ ID NO: 159364 - RNA, 19 nt, Artificial Sequence
  Description of Artificial Sequence: Synthetic oligonucleotide
acgcuuuaugagaaguuua

SEQ ID NO: 159365 - RNA, 19 nt, Artificial Sequence
  Description of Artificial Sequence: Synthetic oligonucleotide
acuuaugcaggaauugacu

SEQ ID NO: 159366 - RNA, 19 nt, Artificial Sequence
  Description of Artificial Sequence: Synthetic oligonucleotide
uguucugcugaagaagcgg

SEQ ID NO: 159367 - RNA, 19 nt, Artificial Sequence
  Description of Artificial Sequence: Synthetic oligonucleotide
gccuaggacagaacaucug

SEQ ID NO: 159368 - RNA, 19 nt, Artificial Sequence
  Description of Artificial Sequence: Synthetic oligonucleotide
guauacccucuguuucccu

SEQ ID NO: 159369 - RNA, 19 nt, Artificial Sequence
  Description of Artificial Sequence: Synthetic oligonucleotide
uuucacuggcaugggagac

SEQ ID NO: 159370 - RNA, 19 nt, Artificial Sequence
  Description of Artificial Sequence: Synthetic oligonucleotide
cccuugacaccugcugaga

SEQ ID NO: 159371 - RNA, 19 nt, Artificial Sequence
  Description of Artificial Sequence: Synthetic oligonucleotide
aaaacaugccucugccaaa

SEQ ID NO: 159372 - RNA, 19 nt, Artificial Sequence
  Description of Artificial Sequence: Synthetic oligonucleotide
aggaugugauauauaagug

SEQ ID NO: 159373 - RNA, 19 nt, Artificial Sequence
  Description of Artificial Sequence: Synthetic oligonucleotide
guacauaugugcuguacac

SEQ ID NO: 159374 - RNA, 19 nt, Artificial Sequence
  Description of Artificial Sequence: Synthetic oligonucleotide
ccugggaccuucaccacug

SEQ ID NO: 159375 - RNA, 19 nt, Artificial Sequence
  Description of Artificial Sequence: Synthetic oligonucleotide
guagaucccaugcauggau

SEQ ID NO: 159376 - RNA, 19 nt, Artificial Sequence
  Description of Artificial Sequence: Synthetic oligonucleotide
ucuauguaguaugcucuga

SEQ ID NO: 159377 - RNA, 19 nt, Artificial Sequence
  Description of Artificial Sequence: Synthetic oligonucleotide
acucuaauaggacuguaua

SEQ ID NO: 159378 - RNA, 19 nt, Artificial Sequence
  Description of Artificial Sequence: Synthetic oligonucleotide
auacuguuuuaagaauggg

SEQ ID NO: 159379 - RNA, 19 nt, Artificial Sequence
  Description of Artificial Sequence: Synthetic oligonucleotide
gcugaaaucagaaugccug

SEQ ID NO: 159380 - RNA, 19 nt, Artificial Sequence
  Description of Artificial Sequence: Synthetic oligonucleotide
guuugugguuucauaugca

SEQ ID NO: 159381 - RNA, 19 nt, Artificial Sequence
  Description of Artificial Sequence: Synthetic oligonucleotide
aauaauauauuuuuuuaaa

SEQ ID NO: 159382 - RNA, 19 nt, Artificial Sequence
  Description of Artificial Sequence: Synthetic oligonucleotide
aaauguggacuucauagga

SEQ ID NO: 159383 - RNA, 19 nt, Artificial Sequence
  Description of Artificial Sequence: Synthetic oligonucleotide
aaggcgugaguacaauuag

SEQ ID NO: 159384 - RNA, 19 nt, Artificial Sequence
  Description of Artificial Sequence: Synthetic oligonucleotide
guauaaugcauaacucauu

SEQ ID NO: 159385 - RNA, 19 nt, Artificial Sequence
  Description of Artificial Sequence: Synthetic oligonucleotide
uguuguccuagauauuuug

SEQ ID NO: 159386 - RNA, 19 nt, Artificial Sequence
  Description of Artificial Sequence: Synthetic oligonucleotide
gauauuuaccuuuauguug

SEQ ID NO: 159387 - RNA, 19 nt, Artificial Sequence
  Description of Artificial Sequence: Synthetic oligonucleotide
gaaugcuauuaaauguuuu

SEQ ID NO: 159388 - RNA, 19 nt, Artificial Sequence
  Description of Artificial Sequence: Synthetic oligonucleotide
uccugugucaaaguaaaau

SEQ ID NO: 159389 - RNA, 19 nt, Artificial Sequence
  Description of Artificial Sequence: Synthetic oligonucleotide
uauuguuaauaaaccuaac

SEQ ID NO: 159390 - RNA, 19 nt, Artificial Sequence
  Description of Artificial Sequence: Synthetic oligonucleotide
caaugacccugauaguaca

SEQ ID NO: 159391 - RNA, 19 nt, Artificial Sequence
  Description of Artificial Sequence: Synthetic oligonucleotide
agguuaagugagagaacua

SEQ ID NO: 159392 - RNA, 19 nt, Artificial Sequence
  Description of Artificial Sequence: Synthetic oligonucleotide
auaugaauucuaacaaguc

SEQ ID NO: 159393 - RNA, 19 nt, Artificial Sequence
  Description of Artificial Sequence: Synthetic oligonucleotide
cauagguuaauauuuaaga

SEQ ID NO: 159394 - RNA, 19 nt, Artificial Sequence
  Description of Artificial Sequence: Synthetic oligonucleotide
acacugaaaaaucuaagug

SEQ ID NO: 159395 - RNA, 19 nt, Artificial Sequence
  Description of Artificial Sequence: Synthetic oligonucleotide
gauauaaaucagauucuuc

SEQ ID NO: 159396 - RNA, 19 nt, Artificial Sequence
  Description of Artificial Sequence: Synthetic oligonucleotide
cucucucaauuuuaucccu

SEQ ID NO: 159397 - RNA, 19 nt, Artificial Sequence
  Description of Artificial Sequence: Synthetic oligonucleotide
ucaccuguagcagccaguc

SEQ ID NO: 159398 - RNA, 19 nt, Artificial Sequence
  Description of Artificial Sequence: Synthetic oligonucleotide
cccguuucauuuagucaug

SEQ ID NO: 159399 - RNA, 19 nt, Artificial Sequence
  Description of Artificial Sequence: Synthetic oligonucleotide
gugaccacucugucuugug

SEQ ID NO: 159400 - RNA, 19 nt, Artificial Sequence
  Description of Artificial Sequence: Synthetic oligonucleotide
guuuccacagccugcaagu

SEQ ID NO: 159401 - RNA, 19 nt, Artificial Sequence
  Description of Artificial Sequence: Synthetic oligonucleotide
ucaguccaggaugcuaaca

SEQ ID NO: 159402 - RNA, 19 nt, Artificial Sequence
  Description of Artificial Sequence: Synthetic oligonucleotide
aucuaaaaauagacuuaaa

SEQ ID NO: 159403 - RNA, 19 nt, Artificial Sequence
  Description of Artificial Sequence: Synthetic oligonucleotide
aucucauugcuuacaagcc

SEQ ID NO: 159404 - RNA, 19 nt, Artificial Sequence
  Description of Artificial Sequence: Synthetic oligonucleotide
cuaagaaucuuuagagaag

SEQ ID NO: 159405 - RNA, 19 nt, Artificial Sequence
  Description of Artificial Sequence: Synthetic oligonucleotide
guauacauaaguuuaggau

SEQ ID NO: 159406 - RNA, 19 nt, Artificial Sequence
  Description of Artificial Sequence: Synthetic oligonucleotide
uaaaauaaugggauuuucu

SEQ ID NO: 159407 - RNA, 19 nt, Artificial Sequence
  Description of Artificial Sequence: Synthetic oligonucleotide
uuuucuuuucucugguaau

SEQ ID NO: 159408 - RNA, 19 nt, Artificial Sequence
  Description of Artificial Sequence: Synthetic oligonucleotide
uauugacuuguauauuuua

SEQ ID NO: 159409 - RNA, 19 nt, Artificial Sequence
  Description of Artificial Sequence: Synthetic oligonucleotide
aagaaauaacagaaagccu

SEQ ID NO: 159410 - RNA, 19 nt, Artificial Sequence
  Description of Artificial Sequence: Synthetic oligonucleotide
ugggugacauuugggagac

SEQ ID NO: 159411 - RNA, 19 nt, Artificial Sequence
  Description of Artificial Sequence: Synthetic oligonucleotide
caugugacauuuauauauu

SEQ ID NO: 159412 - RNA, 19 nt, Artificial Sequence
  Description of Artificial Sequence: Synthetic oligonucleotide
ugaauuaauaucccuacau

SEQ ID NO: 159413 - RNA, 19 nt, Artificial Sequence
  Description of Artificial Sequence: Synthetic oligonucleotide
uguauugcacauuguaaaa

SEQ ID NO: 159414 - RNA, 19 nt, Artificial Sequence
  Description of Artificial Sequence: Synthetic oligonucleotide
aaguuuuaguuuugaugag

SEQ ID NO: 159415 - RNA, 19 nt, Artificial Sequence
  Description of Artificial Sequence: Synthetic oligonucleotide
guugugaguuuaccuugua

SEQ ID NO: 159416 - RNA, 19 nt, Artificial Sequence
  Description of Artificial Sequence: Synthetic oligonucleotide
auacuguaggcacacuuug

SEQ ID NO: 159417 - RNA, 19 nt, Artificial Sequence
  Description of Artificial Sequence: Synthetic oligonucleotide
gcacugauauaucaugagu

SEQ ID NO: 159418 - RNA, 19 nt, Artificial Sequence
  Description of Artificial Sequence: Synthetic oligonucleotide
ugaauaaaugucuugccua

SEQ ID NO: 159419 - RNA, 19 nt, Artificial Sequence
  Description of Artificial Sequence: Synthetic oligonucleotide
acucacgucucaaaaaaaa

SEQ ID NO: 159420 - RNA, 25 nt, Artificial Sequence
  Description of Artificial Sequence: Synthetic oligonucleotide
ugaauugcgagauggauagggcuug

SEQ ID NO: 159421 - RNA, 25 nt, Artificial Sequence
  Description of Artificial Sequence: Synthetic oligonucleotide
gagugcccccagcccugcugauacc

SEQ ID NO: 159422 - RNA, 25 nt, Artificial Sequence
  Description of Artificial Sequence: Synthetic oligonucleotide
caaaugccuuuaagauacagccuuu

SEQ ID NO: 159423 - RNA, 25 nt, Artificial Sequence
  Description of Artificial Sequence: Synthetic oligonucleotide
ucccauccuaaucuacaaaggaaac

SEQ ID NO: 159424 - RNA, 25 nt, Artificial Sequence
  Description of Artificial Sequence: Synthetic oligonucleotide
caggaaaaaggaacuuaaaacuccc

SEQ ID NO: 159425 - RNA, 25 nt, Artificial Sequence
  Description of Artificial Sequence: Synthetic oligonucleotide
cugugcucagacagaaaugagacug

SEQ ID NO: 159426 - RNA, 25 nt, Artificial Sequence
  Description of Artificial Sequence: Synthetic oligonucleotide
guuacagccugcuucugugcuguuc

SEQ ID NO: 159427 - RNA, 25 nt, Artificial Sequence
  Description of Artificial Sequence: Synthetic oligonucleotide
ccuucuugccucuaacuuguaaaca

SEQ ID NO: 159428 - RNA, 25 nt, Artificial Sequence
  Description of Artificial Sequence: Synthetic oligonucleotide
aagacguaguaggacgaugcuaaug

SEQ ID NO: 159429 - RNA, 25 nt, Artificial Sequence
  Description of Artificial Sequence: Synthetic oligonucleotide
ggaaagucacaaaccgcuggguuuu

SEQ ID NO: 159430 - RNA, 25 nt, Artificial Sequence
  Description of Artificial Sequence: Synthetic oligonucleotide
uugaaaggauccuugggaccucaug

SEQ ID NO: 159431 - RNA, 25 nt, Artificial Sequence
  Description of Artificial Sequence: Synthetic oligonucleotide
gcacauuuguggaaacuggauggag

SEQ ID NO: 159432 - RNA, 25 nt, Artificial Sequence
  Description of Artificial Sequence: Synthetic oligonucleotide
gagauuuggggaagcauggacucuu

SEQ ID NO: 159433 - RNA, 25 nt, Artificial Sequence
  Description of Artificial Sequence: Synthetic oligonucleotide
uuagccagcuuaguucucuguggag

SEQ ID NO: 159434 - RNA, 25 nt, Artificial Sequence
  Description of Artificial Sequence: Synthetic oligonucleotide
gucagcuugcuccuuucuggaacug

SEQ ID NO: 159435 - RNA, 25 nt, Artificial Sequence
  Description of Artificial Sequence: Synthetic oligonucleotide
guggaaggugccauggacuugaucu

SEQ ID NO: 159436 - RNA, 25 nt, Artificial Sequence
  Description of Artificial Sequence: Synthetic oligonucleotide
uugaucaauucccuaccucuuguau

SEQ ID NO: 159437 - RNA, 25 nt, Artificial Sequence
  Description of Artificial Sequence: Synthetic oligonucleotide
ucugaugcugaaacaucucucaccu

SEQ ID NO: 159438 - RNA, 25 nt, Artificial Sequence
  Description of Artificial Sequence: Synthetic oligonucleotide
ugcauugccucuggguggcgccccc

SEQ ID NO: 159439 - RNA, 25 nt, Artificial Sequence
  Description of Artificial Sequence: Synthetic oligonucleotide
caugagcccaucaccauaggaaggg

SEQ ID NO: 159440 - RNA, 25 nt, Artificial Sequence
  Description of Artificial Sequence: Synthetic oligonucleotide
gacuuugaagccuuaaugaaccagc

SEQ ID NO: 159441 - RNA, 25 nt, Artificial Sequence
  Description of Artificial Sequence: Synthetic oligonucleotide
caccaggauccgcuggaaguuacuc

SEQ ID NO: 159442 - RNA, 25 nt, Artificial Sequence
  Description of Artificial Sequence: Synthetic oligonucleotide
caagaugugaccagagaaugggcua

SEQ ID NO: 159443 - RNA, 25 nt, Artificial Sequence
  Description of Artificial Sequence: Synthetic oligonucleotide
aaaaaaguuguuuggaagagagaaa

SEQ ID NO: 159444 - RNA, 25 nt, Artificial Sequence
  Description of Artificial Sequence: Synthetic oligonucleotide
aaggcuaguaagaucaauggugcuu

SEQ ID NO: 159445 - RNA, 25 nt, Artificial Sequence
  Description of Artificial Sequence: Synthetic oligonucleotide
uauuucugugaagggcgaguucgag

SEQ ID NO: 159446 - RNA, 25 nt, Artificial Sequence
  Description of Artificial Sequence: Synthetic oligonucleotide
ggagaggcaaucaggauacgaacca

SEQ ID NO: 159447 - RNA, 25 nt, Artificial Sequence
  Description of Artificial Sequence: Synthetic oligonucleotide
augaagaugcgucaacaagcuuccu

SEQ ID NO: 159448 - RNA, 25 nt, Artificial Sequence
  Description of Artificial Sequence: Synthetic oligonucleotide
uuccuaccagcuacuuuaacuauga

SEQ ID NO: 159449 - RNA, 25 nt, Artificial Sequence
  Description of Artificial Sequence: Synthetic oligonucleotide
acuguggacaagggagauaacguga

SEQ ID NO: 159450 - RNA, 25 nt, Artificial Sequence
  Description of Artificial Sequence: Synthetic oligonucleotide
aacauaucuuucaaaaagguauuga

SEQ ID NO: 159451 - RNA, 25 nt, Artificial Sequence
  Description of Artificial Sequence: Synthetic oligonucleotide
auuaaagaagaagaugcagugauuu

SEQ ID NO: 159452 - RNA, 25 nt, Artificial Sequence
  Description of Artificial Sequence: Synthetic oligonucleotide
uacaaaaaugguuccuucauccauu

SEQ ID NO: 159453 - RNA, 25 nt, Artificial Sequence
  Description of Artificial Sequence: Synthetic oligonucleotide
ucagugccccggcaugaaguaccug

SEQ ID NO: 159454 - RNA, 25 nt, Artificial Sequence
  Description of Artificial Sequence: Synthetic oligonucleotide
gauauucuagaaguacaccugccuc

SEQ ID NO: 159455 - RNA, 25 nt, Artificial Sequence
  Description of Artificial Sequence: Synthetic oligonucleotide
caugcucagccccaggaugcuggag

SEQ ID NO: 159456 - RNA, 25 nt, Artificial Sequence
  Description of Artificial Sequence: Synthetic oligonucleotide
guguacucggccagguauauaggag

SEQ ID NO: 159457 - RNA, 25 nt, Artificial Sequence
  Description of Artificial Sequence: Synthetic oligonucleotide
ggaaaccucuucaccucggccuuca

SEQ ID NO: 159458 - RNA, 25 nt, Artificial Sequence
  Description of Artificial Sequence: Synthetic oligonucleotide
accaggcugauaguccggagaugug

SEQ ID NO: 159459 - RNA, 25 nt, Artificial Sequence
  Description of Artificial Sequence: Synthetic oligonucleotide
gaagcccagaaguggggaccugaau

SEQ ID NO: 159460 - RNA, 25 nt, Artificial Sequence
  Description of Artificial Sequence: Synthetic oligonucleotide
ugcaaccaucucuguacugcuugua

SEQ ID NO: 159461 - RNA, 25 nt, Artificial Sequence
  Description of Artificial Sequence: Synthetic oligonucleotide
augaacaauggugucugccaugaag

SEQ ID NO: 159462 - RNA, 25 nt, Artificial Sequence
  Description of Artificial Sequence: Synthetic oligonucleotide
gauacuggagaaugcauuugcccuc

SEQ ID NO: 159463 - RNA, 25 nt, Artificial Sequence
  Description of Artificial Sequence: Synthetic oligonucleotide
ccuggguuuaugggaaggacgugug

SEQ ID NO: 159464 - RNA, 25 nt, Artificial Sequence
  Description of Artificial Sequence: Synthetic oligonucleotide
gagaaggcuugugaacugcacacgu

SEQ ID NO: 159465 - RNA, 25 nt, Artificial Sequence
  Description of Artificial Sequence: Synthetic oligonucleotide
uuuggcagaacuuguaaagaaaggu

SEQ ID NO: 159466 - RNA, 25 nt, Artificial Sequence
  Description of Artificial Sequence: Synthetic oligonucleotide
ugcaguggacaagagggaugcaagu

SEQ ID NO: 159467 - RNA, 25 nt, Artificial Sequence
  Description of Artificial Sequence: Synthetic oligonucleotide
ucuuauguguucugucucccugacc

SEQ ID NO: 159468 - RNA, 25 nt, Artificial Sequence
  Description of Artificial Sequence: Synthetic oligonucleotide
cccuauggguguuccugugccacag

SEQ ID NO: 159469 - RNA, 25 nt, Artificial Sequence
  Description of Artificial Sequence: Synthetic oligonucleotide
ggcuggaagggucugcagugcaaug

SEQ ID NO: 159470 - RNA, 25 nt, Artificial Sequence
  Description of Artificial Sequence: Synthetic oligonucleotide
gaagcaugccacccugguuuuuacg

SEQ ID NO: 159471 - RNA, 25 nt, Artificial Sequence
  Description of Artificial Sequence: Synthetic oligonucleotide
gggccagauuguaagcuuaggugca

SEQ ID NO: 159472 - RNA, 25 nt, Artificial Sequence
  Description of Artificial Sequence: Synthetic oligonucleotide
agcugcaacaauggggagaugugug

SEQ ID NO: 159473 - RNA, 25 nt, Artificial Sequence
  Description of Artificial Sequence: Synthetic oligonucleotide
gaucgcuuccaaggaugucucugcu

SEQ ID NO: 159474 - RNA, 25 nt, Artificial Sequence
  Description of Artificial Sequence: Synthetic oligonucleotide
ucuccaggauggcaggggcuccagu

SEQ ID NO: 159475 - RNA, 25 nt, Artificial Sequence
  Description of Artificial Sequence: Synthetic oligonucleotide
ugugagagagaaggcauaccgagga

SEQ ID NO: 159476 - RNA, 25 nt, Artificial Sequence
  Description of Artificial Sequence: Synthetic oligonucleotide
augaccccaaagauaguggauuugc

SEQ ID NO: 159477 - RNA, 25 nt, Artificial Sequence
  Description of Artificial Sequence: Synthetic oligonucleotide
ccagaucauauagaaguaaacagug

SEQ ID NO: 159478 - RNA, 25 nt, Artificial Sequence
  Description of Artificial Sequence: Synthetic oligonucleotide
gguaaauuuaaucccauuugcaaag

SEQ ID NO: 159479 - RNA, 25 nt, Artificial Sequence
  Description of Artificial Sequence: Synthetic oligonucleotide
gcuucuggcuggccgcuaccuacua

SEQ ID NO: 159480 - RNA, 25 nt, Artificial Sequence
  Description of Artificial Sequence: Synthetic oligonucleotide
aaugaagaaaugacccuggugaagc

SEQ ID NO: 159481 - RNA, 25 nt, Artificial Sequence
  Description of Artificial Sequence: Synthetic oligonucleotide
ccggaugggacagugcuccauccaa

SEQ ID NO: 159482 - RNA, 25 nt, Artificial Sequence
  Description of Artificial Sequence: Synthetic oligonucleotide
aaagacuuuaaccauacggaucauu

SEQ ID NO: 159483 - RNA, 25 nt, Artificial Sequence
  Description of Artificial Sequence: Synthetic oligonucleotide
uucucaguagccauauucaccaucc

SEQ ID NO: 159484 - RNA, 25 nt, Artificial Sequence
  Description of Artificial Sequence: Synthetic oligonucleotide
caccggauccuccccccugacucag

SEQ ID NO: 159485 - RNA, 25 nt, Artificial Sequence
  Description of Artificial Sequence: Synthetic oligonucleotide
ggaguuugggucugcagugugaaca

SEQ ID NO: 159486 - RNA, 25 nt, Artificial Sequence
  Description of Artificial Sequence: Synthetic oligonucleotide
acaguggcugggaugguggaaaagc

SEQ ID NO: 159487 - RNA, 25 nt, Artificial Sequence
  Description of Artificial Sequence: Synthetic oligonucleotide
cccuucaacauuucuguuaaaguuc

SEQ ID NO: 159488 - RNA, 25 nt, Artificial Sequence
  Description of Artificial Sequence: Synthetic oligonucleotide
cuuccaaagccccugaaugccccaa

SEQ ID NO: 159489 - RNA, 25 nt, Artificial Sequence
  Description of Artificial Sequence: Synthetic oligonucleotide
aacgugauugacacuggacauaacu

SEQ ID NO: 159490 - RNA, 25 nt, Artificial Sequence
  Description of Artificial Sequence: Synthetic oligonucleotide
uuugcugucaucaacaucagcucug

SEQ ID NO: 159491 - RNA, 25 nt, Artificial Sequence
  Description of Artificial Sequence: Synthetic oligonucleotide
gagccuuacuuuggggauggaccaa

SEQ ID NO: 159492 - RNA, 25 nt, Artificial Sequence
  Description of Artificial Sequence: Synthetic oligonucleotide
aucaaauccaagaagcuucuauaca

SEQ ID NO: 159493 - RNA, 25 nt, Artificial Sequence
  Description of Artificial Sequence: Synthetic oligonucleotide
aaacccguuaaucacuaugaggcuu

SEQ ID NO: 159494 - RNA, 25 nt, Artificial Sequence
  Description of Artificial Sequence: Synthetic oligonucleotide
uggcaacauauucaagugacaaaug

SEQ ID NO: 159495 - RNA, 25 nt, Artificial Sequence
  Description of Artificial Sequence: Synthetic oligonucleotide
gagauuguuacacucaacuauuugg

SEQ ID NO: 159496 - RNA, 25 nt, Artificial Sequence
  Description of Artificial Sequence: Synthetic oligonucleotide
gaaccucggacagaauaugaacucu

SEQ ID NO: 159497 - RNA, 25 nt, Artificial Sequence
  Description of Artificial Sequence: Synthetic oligonucleotide
ugugugcaacugguccgucguggag

SEQ ID NO: 159498 - RNA, 25 nt, Artificial Sequence
  Description of Artificial Sequence: Synthetic oligonucleotide
gaggguggggaagggcauccuggac

SEQ ID NO: 159499 - RNA, 25 nt, Artificial Sequence
  Description of Artificial Sequence: Synthetic oligonucleotide
ccugugagacgcuucacaacagcuu

SEQ ID NO: 159500 - RNA, 25 nt, Artificial Sequence
  Description of Artificial Sequence: Synthetic oligonucleotide
ucuaucggacucccuccuccaagag

SEQ ID NO: 159501 - RNA, 25 nt, Artificial Sequence
  Description of Artificial Sequence: Synthetic oligonucleotide
ggucuaaaucuccugccuaaaaguc

SEQ ID NO: 159502 - RNA, 25 nt, Artificial Sequence
  Description of Artificial Sequence: Synthetic oligonucleotide
cagaccacucuaaauuugaccuggc

SEQ ID NO: 159503 - RNA, 25 nt, Artificial Sequence
  Description of Artificial Sequence: Synthetic oligonucleotide
caaccaauauuuccaagcucggaag

SEQ ID NO: 159504 - RNA, 25 nt, Artificial Sequence
  Description of Artificial Sequence: Synthetic oligonucleotide
gaugacuuuuauguugaaguggaga

SEQ ID NO: 159505 - RNA, 25 nt, Artificial Sequence
  Description of Artificial Sequence: Synthetic oligonucleotide
agaaggucugugcaaaaaagugauc

SEQ ID NO: 159506 - RNA, 25 nt, Artificial Sequence
  Description of Artificial Sequence: Synthetic oligonucleotide
cagcagaauauuaaaguuccaggca

SEQ ID NO: 159507 - RNA, 25 nt, Artificial Sequence
  Description of Artificial Sequence: Synthetic oligonucleotide
aacuugacuucggugcuacuuaaca

SEQ ID NO: 159508 - RNA, 25 nt, Artificial Sequence
  Description of Artificial Sequence: Synthetic oligonucleotide
aacuuacaucccagggagcaguacg

SEQ ID NO: 159509 - RNA, 25 nt, Artificial Sequence
  Description of Artificial Sequence: Synthetic oligonucleotide
gugguccgagcuagagucaacacca

SEQ ID NO: 159510 - RNA, 25 nt, Artificial Sequence
  Description of Artificial Sequence: Synthetic oligonucleotide
aaggcccagggggaauggagugaag

SEQ ID NO: 159511 - RNA, 25 nt, Artificial Sequence
  Description of Artificial Sequence: Synthetic oligonucleotide
gaucucacugcuuggacccuuagug

SEQ ID NO: 159512 - RNA, 25 nt, Artificial Sequence
  Description of Artificial Sequence: Synthetic oligonucleotide
gacauucuuccuccucaaccagaaa

SEQ ID NO: 159513 - RNA, 25 nt, Artificial Sequence
  Description of Artificial Sequence: Synthetic oligonucleotide
aacaucaagauuuccaacauuacac

SEQ ID NO: 159514 - RNA, 25 nt, Artificial Sequence
  Description of Artificial Sequence: Synthetic oligonucleotide
cacuccucagcugugauuucuugga

SEQ ID NO: 159515 - RNA, 25 nt, Artificial Sequence
  Description of Artificial Sequence: Synthetic oligonucleotide
acaauauuggauggcuauucuauuu

SEQ ID NO: 159516 - RNA, 25 nt, Artificial Sequence
  Description of Artificial Sequence: Synthetic oligonucleotide
ucuucuauuacuauccguuacaagg

SEQ ID NO: 159517 - RNA, 25 nt, Artificial Sequence
  Description of Artificial Sequence: Synthetic oligonucleotide
guucaaggcaagaaugaagaccagc

SEQ ID NO: 159518 - RNA, 25 nt, Artificial Sequence
  Description of Artificial Sequence: Synthetic oligonucleotide
cacguugaugugaagauaaagaaug

SEQ ID NO: 159519 - RNA, 25 nt, Artificial Sequence
  Description of Artificial Sequence: Synthetic oligonucleotide
gccaccaucacucaguaucagcuca

SEQ ID NO: 159520 - RNA, 25 nt, Artificial Sequence
  Description of Artificial Sequence: Synthetic oligonucleotide
aagggccuagagccugaaacagcau

SEQ ID NO: 159521 - RNA, 25 nt, Artificial Sequence
  Description of Artificial Sequence: Synthetic oligonucleotide
uaccagguggacauuuuugcagaga

SEQ ID NO: 159522 - RNA, 25 nt, Artificial Sequence
  Description of Artificial Sequence: Synthetic oligonucleotide
aacaacauagggucaagcaacccag

SEQ ID NO: 159523 - RNA, 25 nt, Artificial Sequence
  Description of Artificial Sequence: Synthetic oligonucleotide
gccuuuucucaugaacuggugaccc

SEQ ID NO: 159524 - RNA, 25 nt, Artificial Sequence
  Description of Artificial Sequence: Synthetic oligonucleotide
cucccagaaucucaagcaccagcgg

SEQ ID NO: 159525 - RNA, 25 nt, Artificial Sequence
  Description of Artificial Sequence: Synthetic oligonucleotide
gaccucggaggggggaagaugcugc

SEQ ID NO: 159526 - RNA, 25 nt, Artificial Sequence
  Description of Artificial Sequence: Synthetic oligonucleotide
cuuauagccauccuuggcucugcug

SEQ ID NO: 159527 - RNA, 25 nt, Artificial Sequence
  Description of Artificial Sequence: Synthetic oligonucleotide
ggaaugaccugccugacugugcugu

SEQ ID NO: 159528 - RNA, 25 nt, Artificial Sequence
  Description of Artificial Sequence: Synthetic oligonucleotide
uuggccuuucugaucauauugcaau

SEQ ID NO: 159529 - RNA, 25 nt, Artificial Sequence
  Description of Artificial Sequence: Synthetic oligonucleotide
uugaagagggcaaaugugcaaagga

SEQ ID NO: 159530 - RNA, 25 nt, Artificial Sequence
  Description of Artificial Sequence: Synthetic oligonucleotide
agaauggcccaagccuuccaaaacg

SEQ ID NO: 159531 - RNA, 25 nt, Artificial Sequence
  Description of Artificial Sequence: Synthetic oligonucleotide
gugagggaagaaccagcugugcagu

SEQ ID NO: 159532 - RNA, 25 nt, Artificial Sequence
  Description of Artificial Sequence: Synthetic oligonucleotide
uucaacucagggacucuggcccuaa

SEQ ID NO: 159533 - RNA, 25 nt, Artificial Sequence
  Description of Artificial Sequence: Synthetic oligonucleotide
aacaggaaggucaaaaacaacccag

SEQ ID NO: 159534 - RNA, 25 nt, Artificial Sequence
  Description of Artificial Sequence: Synthetic oligonucleotide
gauccuacaauuuauccagugcuug

SEQ ID NO: 159535 - RNA, 25 nt, Artificial Sequence
  Description of Artificial Sequence: Synthetic oligonucleotide
gacuggaaugacaucaaauuucaag

SEQ ID NO: 159536 - RNA, 25 nt, Artificial Sequence
  Description of Artificial Sequence: Synthetic oligonucleotide
gaugugauuggggagggcaauuuug

SEQ ID NO: 159537 - RNA, 25 nt, Artificial Sequence
  Description of Artificial Sequence: Synthetic oligonucleotide
ggccaaguucuuaaggcgcgcauca

SEQ ID NO: 159538 - RNA, 25 nt, Artificial Sequence
  Description of Artificial Sequence: Synthetic oligonucleotide
aagaaggauggguuacggauggaug

SEQ ID NO: 159539 - RNA, 25 nt, Artificial Sequence
  Description of Artificial Sequence: Synthetic oligonucleotide
gcugccaucaaaagaaugaaagaau

SEQ ID NO: 159540 - RNA, 25 nt, Artificial Sequence
  Description of Artificial Sequence: Synthetic oligonucleotide
uaugccuccaaagaugaucacaggg

SEQ ID NO: 159541 - RNA, 25 nt, Artificial Sequence
  Description of Artificial Sequence: Synthetic oligonucleotide
gacuuugcaggagaacuggaaguuc

SEQ ID NO: 159542 - RNA, 25 nt, Artificial Sequence
  Description of Artificial Sequence: Synthetic oligonucleotide
cuuuguaaacuuggacaccauccaa

SEQ ID NO: 159543 - RNA, 25 nt, Artificial Sequence
  Description of Artificial Sequence: Synthetic oligonucleotide
aacaucaucaaucucuuaggagcau

SEQ ID NO: 159544 - RNA, 25 nt, Artificial Sequence
  Description of Artificial Sequence: Synthetic oligonucleotide
ugugaacaucgaggcuacuuguacc

SEQ ID NO: 159545 - RNA, 25 nt, Artificial Sequence
  Description of Artificial Sequence: Synthetic oligonucleotide
cuggccauugaguacgcgccccaug

SEQ ID NO: 159546 - RNA, 25 nt, Artificial Sequence
  Description of Artificial Sequence: Synthetic oligonucleotide
ggaaaccuucuggacuuccuucgca

SEQ ID NO: 159547 - RNA, 25 nt, Artificial Sequence
  Description of Artificial Sequence: Synthetic oligonucleotide
aagagccgugugcuggagacggacc

SEQ ID NO: 159548 - RNA, 25 nt, Artificial Sequence
  Description of Artificial Sequence: Synthetic oligonucleotide
ccagcauuugccauugccaauagca

SEQ ID NO: 159549 - RNA, 25 nt, Artificial Sequence
  Description of Artificial Sequence: Synthetic oligonucleotide
accgcguccacacuguccucccagc

SEQ ID NO: 159550 - RNA, 25 nt, Artificial Sequence
  Description of Artificial Sequence: Synthetic oligonucleotide
cagcuccuucacuucgcugccgacg

SEQ ID NO: 159551 - RNA, 25 nt, Artificial Sequence
  Description of Artificial Sequence: Synthetic oligonucleotide
guggcccggggcauggacuacuuga

SEQ ID NO: 159552 - RNA, 25 nt, Artificial Sequence
  Description of Artificial Sequence: Synthetic oligonucleotide
agccaaaaacaguuuauccacaggg

SEQ ID NO: 159553 - RNA, 25 nt, Artificial Sequence
  Description of Artificial Sequence: Synthetic oligonucleotide
gaucuggcugccagaaacauuuuag

SEQ ID NO: 159554 - RNA, 25 nt, Artificial Sequence
  Description of Artificial Sequence: Synthetic oligonucleotide
guuggugaaaacuauguggcaaaaa

SEQ ID NO: 159555 - RNA, 25 nt, Artificial Sequence
  Description of Artificial Sequence: Synthetic oligonucleotide
auagcagauuuuggauugucccgag

SEQ ID NO: 159556 - RNA, 25 nt, Artificial Sequence
  Description of Artificial Sequence: Synthetic oligonucleotide
ggucaagagguguaugugaaaaaga

SEQ ID NO: 159557 - RNA, 25 nt, Artificial Sequence
  Description of Artificial Sequence: Synthetic oligonucleotide
acaaugggaaggcucccagugcgcu

SEQ ID NO: 159558 - RNA, 25 nt, Artificial Sequence
  Description of Artificial Sequence: Synthetic oligonucleotide
uggauggccaucgagucacugaauu

SEQ ID NO: 159559 - RNA, 25 nt, Artificial Sequence
  Description of Artificial Sequence: Synthetic oligonucleotide
uacaguguguacacaaccaacagug

SEQ ID NO: 159560 - RNA, 25 nt, Artificial Sequence
  Description of Artificial Sequence: Synthetic oligonucleotide
gauguaugguccuaugguguguuac

SEQ ID NO: 159561 - RNA, 25 nt, Artificial Sequence
  Description of Artificial Sequence: Synthetic oligonucleotide
cuaugggagauuguuagcuuaggag

SEQ ID NO: 159562 - RNA, 25 nt, Artificial Sequence
  Description of Artificial Sequence: Synthetic oligonucleotide
ggcacacccuacugcgggaugacuu

SEQ ID NO: 159563 - RNA, 25 nt, Artificial Sequence
  Description of Artificial Sequence: Synthetic oligonucleotide
ugugcagaacucuacgagaagcugc

SEQ ID NO: 159564 - RNA, 25 nt, Artificial Sequence
  Description of Artificial Sequence: Synthetic oligonucleotide
ccccagggcuacagacuggagaagc

SEQ ID NO: 159565 - RNA, 25 nt, Artificial Sequence
  Description of Artificial Sequence: Synthetic oligonucleotide
ccccugaacugugaugaugaggugu

SEQ ID NO: 159566 - RNA, 25 nt, Artificial Sequence
  Description of Artificial Sequence: Synthetic oligonucleotide
uaugaucuaaugagacaaugcuggc

SEQ ID NO: 159567 - RNA, 25 nt, Artificial Sequence
  Description of Artificial Sequence: Synthetic oligonucleotide
cgggagaagccuuaugagaggccau

SEQ ID NO: 159568 - RNA, 25 nt, Artificial Sequence
  Description of Artificial Sequence: Synthetic oligonucleotide
ucauuugcccagauauugguguccu

SEQ ID NO: 159569 - RNA, 25 nt, Artificial Sequence
  Description of Artificial Sequence: Synthetic oligonucleotide
uuaaacagaauguuagaggagcgaa

SEQ ID NO: 159570 - RNA, 25 nt, Artificial Sequence
  Description of Artificial Sequence: Synthetic oligonucleotide
aagaccuacgugaauaccacgcuuu

SEQ ID NO: 159571 - RNA, 25 nt, Artificial Sequence
  Description of Artificial Sequence: Synthetic oligonucleotide
uaugagaaguuuacuuaugcaggaa

SEQ ID NO: 159572 - RNA, 25 nt, Artificial Sequence
  Description of Artificial Sequence: Synthetic oligonucleotide
auugacuguucugcugaagaagcgg

SEQ ID NO: 159573 - RNA, 25 nt, Artificial Sequence
  Description of Artificial Sequence: Synthetic oligonucleotide
gccuaggacagaacaucuguauacc

SEQ ID NO: 159574 - RNA, 25 nt, Artificial Sequence
  Description of Artificial Sequence: Synthetic oligonucleotide
ccucuguuucccuuucacuggcaug

SEQ ID NO: 159575 - RNA, 25 nt, Artificial Sequence
  Description of Artificial Sequence: Synthetic oligonucleotide
gggagacccuugacaccugcugaga

SEQ ID NO: 159576 - RNA, 25 nt, Artificial Sequence
  Description of Artificial Sequence: Synthetic oligonucleotide
aaaacaugccucugccaaaggaugu

SEQ ID NO: 159577 - RNA, 25 nt, Artificial Sequence
  Description of Artificial Sequence: Synthetic oligonucleotide
ugauauauaaguguacauaugugcu

SEQ ID NO: 159578 - RNA, 25 nt, Artificial Sequence
  Description of Artificial Sequence: Synthetic oligonucleotide
uguacaccugggaccuucaccacug

SEQ ID NO: 159579 - RNA, 25 nt, Artificial Sequence
  Description of Artificial Sequence: Synthetic oligonucleotide
guagaucccaugcauggaucuaugu

SEQ ID NO: 159580 - RNA, 25 nt, Artificial Sequence
  Description of Artificial Sequence: Synthetic oligonucleotide
uaguaugcucugacucuaauaggac

SEQ ID NO: 159581 - RNA, 25 nt, Artificial Sequence
  Description of Artificial Sequence: Synthetic oligonucleotide
cuguauauacuguuuuaagaauggg

SEQ ID NO: 159582 - RNA, 25 nt, Artificial Sequence
  Description of Artificial Sequence: Synthetic oligonucleotide
gcugaaaucagaaugccuguuugug

SEQ ID NO: 159583 - RNA, 25 nt, Artificial Sequence
  Description of Artificial Sequence: Synthetic oligonucleotide
gguuucauaugcaauaauauauuuu

SEQ ID NO: 159584 - RNA, 25 nt, Artificial Sequence
  Description of Artificial Sequence: Synthetic oligonucleotide
uuuuaaaaauguggacuucauagga

SEQ ID NO: 159585 - RNA, 25 nt, Artificial Sequence
  Description of Artificial Sequence: Synthetic oligonucleotide
aaggcgugaguacaauuaguauaau

SEQ ID NO: 159586 - RNA, 25 nt, Artificial Sequence
  Description of Artificial Sequence: Synthetic oligonucleotide
ugcauaacucauuguuguccuagau

SEQ ID NO: 159587 - RNA, 25 nt, Artificial Sequence
  Description of Artificial Sequence: Synthetic oligonucleotide
uauuuugauauuuaccuuuauguug

SEQ ID NO: 159588 - RNA, 25 nt, Artificial Sequence
  Description of Artificial Sequence: Synthetic oligonucleotide
gaaugcuauuaaauguuuuccugug

SEQ ID NO: 159589 - RNA, 25 nt, Artificial Sequence
  Description of Artificial Sequence: Synthetic oligonucleotide
gucaaaguaaaauauuguuaauaaa

SEQ ID NO: 159590 - RNA, 25 nt, Artificial Sequence
  Description of Artificial Sequence: Synthetic oligonucleotide
accuaacaaugacccugauaguaca

SEQ ID NO: 159591 - RNA, 25 nt, Artificial Sequence
  Description of Artificial Sequence: Synthetic oligonucleotide
agguuaagugagagaacuauaugaa

SEQ ID NO: 159592 - RNA, 25 nt, Artificial Sequence
  Description of Artificial Sequence: Synthetic oligonucleotide
auucuaacaagucauagguuaauau

SEQ ID NO: 159593 - RNA, 25 nt, Artificial Sequence
  Description of Artificial Sequence: Synthetic oligonucleotide
uuuaagacacugaaaaaucuaagug

SEQ ID NO: 159594 - RNA, 25 nt, Artificial Sequence
  Description of Artificial Sequence: Synthetic oligonucleotide
gauauaaaucagauucuucucucuc

SEQ ID NO: 159595 - RNA, 25 nt, Artificial Sequence
  Description of Artificial Sequence: Synthetic oligonucleotide
caauuuuaucccucaccuguagcag

SEQ ID NO: 159596 - RNA, 25 nt, Artificial Sequence
  Description of Artificial Sequence: Synthetic oligonucleotide
gccagucccguuucauuuagucaug

SEQ ID NO: 159597 - RNA, 25 nt, Artificial Sequence
  Description of Artificial Sequence: Synthetic oligonucleotide
gugaccacucugucuuguguuucca

SEQ ID NO: 159598 - RNA, 25 nt, Artificial Sequence
  Description of Artificial Sequence: Synthetic oligonucleotide
acagccugcaagucaguccaggaug

SEQ ID NO: 159599 - RNA, 25 nt, Artificial Sequence
  Description of Artificial Sequence: Synthetic oligonucleotide
gcuaacaucuaaaaauagacuuaaa

SEQ ID NO: 159600 - RNA, 25 nt, Artificial Sequence
  Description of Artificial Sequence: Synthetic oligonucleotide
aucucauugcuuacaagccuaagaa

SEQ ID NO: 159601 - RNA, 25 nt, Artificial Sequence
  Description of Artificial Sequence: Synthetic oligonucleotide
aucuuuagagaaguauacauaaguu

SEQ ID NO: 159602 - RNA, 25 nt, Artificial Sequence
  Description of Artificial Sequence: Synthetic oligonucleotide
uuaggauaaaauaaugggauuuucu

SEQ ID NO: 159603 - RNA, 25 nt, Artificial Sequence
  Description of Artificial Sequence: Synthetic oligonucleotide
uuuucuuuucucugguaauauugac

SEQ ID NO: 159604 - RNA, 25 nt, Artificial Sequence
  Description of Artificial Sequence: Synthetic oligonucleotide
cuuguauauuuuaagaaauaacaga

SEQ ID NO: 159605 - RNA, 25 nt, Artificial Sequence
  Description of Artificial Sequence: Synthetic oligonucleotide
aaagccugggugacauuugggagac

SEQ ID NO: 159606 - RNA, 25 nt, Artificial Sequence
  Description of Artificial Sequence: Synthetic oligonucleotide
caugugacauuuauauauugaauua

SEQ ID NO: 159607 - RNA, 25 nt, Artificial Sequence
  Description of Artificial Sequence: Synthetic oligonucleotide
aauaucccuacauguauugcacauu

SEQ ID NO: 159608 - RNA, 25 nt, Artificial Sequence
  Description of Artificial Sequence: Synthetic oligonucleotide
uguaaaaaguuuuaguuuugaugag

SEQ ID NO: 159609 - RNA, 25 nt, Artificial Sequence
  Description of Artificial Sequence: Synthetic oligonucleotide
guugugaguuuaccuuguauacugu

SEQ ID NO: 159610 - RNA, 25 nt, Artificial Sequence
  Description of Artificial Sequence: Synthetic oligonucleotide
uaggcacacuuugcacugauauauc

SEQ ID NO: 159611 - RNA, 25 nt, Artificial Sequence
  Description of Artificial Sequence: Synthetic oligonucleotide
caugagugaauaaaugucuugccua

SEQ ID NO: 159612 - DNA, 21 bp, Artificial Sequence
  Description of Artificial Sequence: Synthetic oligonucleotide
  Description of Combined DNA/RNA Molecule: Synthetic oligonucleotide
cuacacaaaucagcgauuutt

SEQ ID NO: 159613 - DNA, 21 bp, Artificial Sequence
  Description of Artificial Sequence: Synthetic oligonucleotide
  Description of Combined DNA/RNA Molecule: Synthetic oligonucleotide
aaaucgcugauuuguguagtt

SEQ ID NO: 159614 - DNA, 25 bp, Artificial Sequence
  Description of Artificial Sequence: Synthetic oligonucleotide
  Description of Combined DNA/RNA Molecule: Synthetic oligonucleotide
cuacacaaaucagcgauuuccaugt

SEQ ID NO: 159615 - RNA, 27 nt, Artificial Sequence
  Description of Artificial Sequence: Synthetic oligonucleotide
acauggaaaucgcugauuuguguaguc

SEQ ID NO: 159616 - RNA, 13 nt, Artificial Sequence
  Description of Artificial Sequence: Synthetic oligonucleotide
cuacacaaaucag

SEQ ID NO: 159617 - DNA, 11 bp, Artificial Sequence
  Description of Artificial Sequence: Synthetic oligonucleotide
  Description of Combined DNA/RNA Molecule: Synthetic oligonucleotide
gauuuccaugt

SEQ ID NO: 159618 - DNA, 21 bp, Artificial Sequence
  Description of Artificial Sequence: Synthetic oligonucleotide
  Description of Combined DNA/RNA Molecule: Synthetic oligonucleotide
ggaucuuauuucuucggagtt

SEQ ID NO: 159619 - DNA, 21 bp, Artificial Sequence
  Description of Artificial Sequence: Synthetic oligonucleotide
  Description of Combined DNA/RNA Molecule: Synthetic oligonucleotide
cuccgaagaaauaagaucctt

SEQ ID NO: 159620 - RNA, 11 nt, Artificial Sequence
  Description of Artificial Sequence: Synthetic oligonucleotide
ggaucuuauuu

SEQ ID NO: 159621 - DNA, 10 bp, Artificial Sequence
  Description of Artificial Sequence: Synthetic oligonucleotide
  Description of Combined DNA/RNA Molecule: Synthetic oligonucleotide
cuucggagtt

SEQ ID NO: 159622 - RNA, 27 nt, Artificial Sequence
  Description of Artificial Sequence: Synthetic oligonucleotide
cauugucuccgaagaaauaagauccuu

SEQ ID NO: 159623 - RNA, 8 nt, Artificial Sequence
  Description of Artificial Sequence: Synthetic oligonucleotide
  modified_base (2): LNA-G
ggaucuua

SEQ ID NO: 159624 - DNA, 17 bp, Artificial Sequence
  Description of Artificial Sequence: Synthetic oligonucleotide
  Description of Combined DNA/RNA Molecule: Synthetic oligonucleotide
uuucuucggagacaatg

SEQ ID NO: 159625 - DNA, 16 bp, Artificial Sequence
  Description of Artificial Sequence: Synthetic oligonucleotide
  Description of Combined DNA/RNA Molecule: Synthetic oligonucleotide
uucuucggagacaatg

SEQ ID NO: 159626 - DNA, 15 bp, Artificial Sequence
  Description of Artificial Sequence: Synthetic oligonucleotide
  Description of Combined DNA/RNA Molecule: Synthetic oligonucleotide
ucuucggagacaatg

SEQ ID NO: 159627 - DNA, 14 bp, Artificial Sequence
  Description of Artificial Sequence: Synthetic oligonucleotide
  Description of Combined DNA/RNA Molecule: Synthetic oligonucleotide
cuucggagacaatg

SEQ ID NO: 159628 - DNA, 13 bp, Artificial Sequence
  Description of Artificial Sequence: Synthetic oligonucleotide
  Description of Combined DNA/RNA Molecule: Synthetic oligonucleotide
uucggagacaatg

SEQ ID NO: 159629 - DNA, 12 bp, Artificial Sequence
  Description of Artificial Sequence: Synthetic oligonucleotide
  Description of Combined DNA/RNA Molecule: Synthetic oligonucleotide
ucggagacaatg

SEQ ID NO: 159630 - DNA, 11 bp, Artificial Sequence
  Description of Artificial Sequence: Synthetic oligonucleotide
  Description of Combined DNA/RNA Molecule: Synthetic oligonucleotide
cggagacaatg

SEQ ID NO: 159631 - RNA, 9 nt, Artificial Sequence
  Description of Artificial Sequence: Synthetic oligonucleotide
  modified_base (2): LNA-G
ggaucuuau

SEQ ID NO: 159632 - RNA, 10 nt, Artificial Sequence
  Description of Artificial Sequence: Synthetic oligonucleotide
  modified_base (2): LNA-G
ggaucuuauu

SEQ ID NO: 159633 - RNA, 11 nt, Artificial Sequence
  Description of Artificial Sequence: Synthetic oligonucleotide
  modified_base (2): LNA-G
ggaucuuauuu

SEQ ID NO: 159634 - RNA, 12 nt, Artificial Sequence
  Description of Artificial Sequence: Synthetic oligonucleotide
  modified_base (2): LNA-G
ggaucuuauuuc

SEQ ID NO: 159635 - RNA, 8 nt, Artificial Sequence
  Description of Artificial Sequence: Synthetic oligonucleotide
  modified_base (3): LNA-A
cuacacaa

SEQ ID NO: 159636 - DNA, 13 bp, Artificial Sequence
  Description of Artificial Sequence: Synthetic oligonucleotide
  Description of Combined DNA/RNA Molecule: Synthetic oligonucleotide
  modified_base (8): LNA-A
aucagcgauuutt

SEQ ID NO: 159637 - DNA, 12 bp, Artificial Sequence
  Description of Artificial Sequence: Synthetic oligonucleotide
  Description of Combined DNA/RNA Molecule: Synthetic oligonucleotide
  modified_base (7): LNA-A
ucagcgauuutt

SEQ ID NO: 159638 - DNA, 11 bp, Artificial Sequence
  Description of Artificial Sequence: Synthetic oligonucleotide
  Description of Combined DNA/RNA Molecule: Synthetic oligonucleotide
  modified_base (6): LNA-A
cagcgauuutt

SEQ ID NO: 159639 - DNA, 10 bp, Artificial Sequence
  Description of Artificial Sequence: Synthetic oligonucleotide
  Description of Combined DNA/RNA Molecule: Synthetic oligonucleotide
  modified_base (5): LNA-A
agcgauuutt

SEQ ID NO: 159640 - DNA, 9 bp, Artificial Sequence
  Description of Artificial Sequence: Synthetic oligonucleotide
  Description of Combined DNA/RNA Molecule: Synthetic oligonucleotide
  modified_base (4): LNA-A
gcgauuutt

SEQ ID NO: 159641 - DNA, 8 bp, Artificial Sequence
  Description of Artificial Sequence: Synthetic oligonucleotide
  Description of Combined DNA/RNA Molecule: Synthetic oligonucleotide
  modified_base (3): LNA-A
cgauuutt

SEQ ID NO: 159642 - DNA, 7 bp, Artificial Sequence
  Description of Artificial Sequence: Synthetic oligonucleotide
  Description of Combined DNA/RNA Molecule: Synthetic oligonucleotide
  modified_base (2): LNA-A
gauuutt

SEQ ID NO: 159643 - RNA, 9 nt, Artificial Sequence
  Description of Artificial Sequence: Synthetic oligonucleotide
  modified_base (3): LNA-A
cuacacaaa

SEQ ID NO: 159644 - RNA, 10 nt, Artificial Sequence
  Description of Artificial Sequence: Synthetic oligonucleotide
  modified_base (3): LNA-A
cuacacaaau

SEQ ID NO: 159645 - RNA, 11 nt, Artificial Sequence
  Description of Artificial Sequence: Synthetic oligonucleotide
  modified_base (3): LNA-A
cuacacaaauc

SEQ ID NO: 159646 - RNA, 12 nt, Artificial Sequence
  Description of Artificial Sequence: Synthetic oligonucleotide
  modified_base (3): LNA-A
cuacacaaauca

SEQ ID NO: 159647 - RNA, 13 nt, Artificial Sequence
  Description of Artificial Sequence: Synthetic oligonucleotide
  modified_base (3): LNA-A
cuacacaaaucag

SEQ ID NO: 159648 - RNA, 14 nt, Artificial Sequence
  Description of Artificial Sequence: Synthetic oligonucleotide
  modified_base (3): LNA-A
cuacacaaaucagc

SEQ ID NO: 159649 - RNA, 13 nt, Artificial Sequence
  Description of Artificial Sequence: Synthetic oligonucleotide
  modified_base (2): LNA-G
ggaucuuauuucu

SEQ ID NO: 159650 - RNA, 14 nt, Artificial Sequence
  Description of Artificial Sequence: Synthetic oligonucleotide
  modified_base (2): LNA-G
ggaucuuauuucuu

SEQ ID NO: 159651 - RNA, 8 nt, Artificial Sequence
  Description of Artificial Sequence: Synthetic oligonucleotide
  modified_base (2): LNA-G
  modified_base (8): LNA-A
ggaucuua

SEQ ID NO: 159652 - RNA, 9 nt, Artificial Sequence
  Description of Artificial Sequence: Synthetic oligonucleotide
  modified_base (2): LNA-G
  modified_base (9): LNA-U
ggaucuuau

SEQ ID NO: 159653 - RNA, 10 nt, Artificial Sequence
  Description of Artificial Sequence: Synthetic oligonucleotide
  modified_base (2): LNA-G
  modified_base (10): LNA-U
ggaucuuauu

SEQ ID NO: 159654 - RNA, 11 nt, Artificial Sequence
  Description of Artificial Sequence: Synthetic oligonucleotide
  modified_base (2): LNA-G
  modified_base (11): LNA-U
ggaucuuauuu

SEQ ID NO: 159655 - RNA, 12 nt, Artificial Sequence
  Description of Artificial Sequence: Synthetic oligonucleotide
  modified_base (2): LNA-G
  modified_base (12): LNA-C
ggaucuuauuuc

SEQ ID NO: 159656 - RNA, 13 nt, Artificial Sequence
  Description of Artificial Sequence: Synthetic oligonucleotide
  modified_base (2): LNA-G
  modified_base (13): LNA-U
ggaucuuauuucu

SEQ ID NO: 159657 - RNA, 14 nt, Artificial Sequence
  Description of Artificial Sequence: Synthetic oligonucleotide
  modified_base (2): LNA-G
  modified_base (14): LNA-U
ggaucuuauuucuu

SEQ ID NO: 159658 - DNA, 13 bp, Artificial Sequence
  Description of Artificial Sequence: Synthetic oligonucleotide
  Description of Combined DNA/RNA Molecule: Synthetic oligonucleotide
  modified_base (8): LNA-G
uuucuucggagtt

SEQ ID NO: 159659 - DNA, 12 bp, Artificial Sequence
  Description of Artificial Sequence: Synthetic oligonucleotide
  Description of Combined DNA/RNA Molecule: Synthetic oligonucleotide
  modified_base (7): LNA-G
uucuucggagtt

SEQ ID NO: 159660 - DNA, 11 bp, Artificial Sequence
  Description of Artificial Sequence: Synthetic oligonucleotide
  Description of Combined DNA/RNA Molecule: Synthetic oligonucleotide
  modified_base (6): LNA-G
ucuucggagtt

SEQ ID NO: 159661 - DNA, 10 bp, Artificial Sequence
  Description of Artificial Sequence: Synthetic oligonucleotide
  Description of Combined DNA/RNA Molecule: Synthetic oligonucleotide
  modified_base (5): LNA-G
cuucggagtt

SEQ ID NO: 159662 - DNA, 9 bp, Artificial Sequence
  Description of Artificial Sequence: Synthetic oligonucleotide
  Description of Combined DNA/RNA Molecule: Synthetic oligonucleotide
  modified_base (4): LNA-G
uucggagtt

SEQ ID NO: 159663 - DNA, 8 bp, Artificial Sequence
  Description of Artificial Sequence: Synthetic oligonucleotide
  Description of Combined DNA/RNA Molecule: Synthetic oligonucleotide
  modified_base (3): LNA-G
ucggagtt

SEQ ID NO: 159664 - DNA, 7 bp, Artificial Sequence
  Description of Artificial Sequence: Synthetic oligonucleotide
  Description of Combined DNA/RNA Molecule: Synthetic oligonucleotide
  modified_base (2): LNA-G
cggagtt

SEQ ID NO: 159665 - DNA, 13 bp, Artificial Sequence
  Description of Artificial Sequence: Synthetic oligonucleotide
  Description of Combined DNA/RNA Molecule: Synthetic oligonucleotide
  modified_base (1): LNA-U
  modified_base (8): LNA-G
uuucuucggagtt

SEQ ID NO: 159666 - DNA, 12 bp, Artificial Sequence
  Description of Artificial Sequence: Synthetic oligonucleotide
  Description of Combined DNA/RNA Molecule: Synthetic oligonucleotide
  modified_base (1): LNA-U
  modified_base (7): LNA-G
uucuucggagtt

SEQ ID NO: 159667 - DNA, 11 bp, Artificial Sequence
  Description of Artificial Sequence: Synthetic oligonucleotide
  Description of Combined DNA/RNA Molecule: Synthetic oligonucleotide
  modified_base (1): LNA-U
  modified_base (6): LNA-G
ucuucggagtt

SEQ ID NO: 159668 - DNA, 10 bp, Artificial Sequence
  Description of Artificial Sequence: Synthetic oligonucleotide
  Description of Combined DNA/RNA Molecule: Synthetic oligonucleotide
  modified_base (1): LNA-C
  modified_base (5): LNA-G
cuucggagtt

SEQ ID NO: 159669 - DNA, 9 bp, Artificial Sequence
  Description of Artificial Sequence: Synthetic oligonucleotide
  Description of Combined DNA/RNA Molecule: Synthetic oligonucleotide
  modified_base (1): LNA-U
  modified_base (4): LNA-G
uucggagtt

SEQ ID NO: 159670 - DNA, 8 bp, Artificial Sequence
  Description of Artificial Sequence: Synthetic oligonucleotide
  Description of Combined DNA/RNA Molecule: Synthetic oligonucleotide
  modified_base (1): LNA-U
  modified_base (3): LNA-G
ucggagtt

SEQ ID NO: 159671 - DNA, 7 bp, Artificial Sequence
  Description of Artificial Sequence: Synthetic oligonucleotide
  Description of Combined DNA/RNA Molecule: Synthetic oligonucleotide
  modified_base (1): LNA-C
  modified_base (2): LNA-G
cggagtt

SEQ ID NO: 159672 - DNA, 21 bp, Artificial Sequence
  Description of Artificial Sequence: Synthetic oligonucleotide
  Description of Combined DNA/RNA Molecule: Synthetic oligonucleotide
  modified_base (2): LNA-G
  modified_base (16): LNA-G
ggaucuuauuucuucggagtt

SEQ ID NO: 159673 - DNA, 25 bp, Artificial Sequence
  Description of Artificial Sequence: Synthetic oligonucleotide
  Description of Combined DNA/RNA Molecule: Synthetic oligonucleotide
ggaucuuauuucuucggagacaatg

SEQ ID NO: 159674 - RNA, 25 nt, Artificial Sequence
  Description of Artificial Sequence: Synthetic oligonucleotide
guauuuugaugaggaguucacggcc

SEQ ID NO: 159675 - RNA, 25 nt, Artificial Sequence
  Description of Artificial Sequence: Synthetic oligonucleotide
ggcccagaugaucaccaucacacca

SEQ ID NO: 159676 - RNA, 25 nt, Artificial Sequence
  Description of Artificial Sequence: Synthetic oligonucleotide
gggaagaaaacuauccugcggguuu

SEQ ID NO: 159677 - RNA, 25 nt, Artificial Sequence
  Description of Artificial Sequence: Synthetic oligonucleotide
guuuuaauuuauuucauccaguuug

SEQ ID NO: 159678 - RNA, 25 nt, Artificial Sequence
  Description of Artificial Sequence: Synthetic oligonucleotide
acguagggaaauguuaaggacuucu

SEQ ID NO: 159679 - RNA, 25 nt, Artificial Sequence
  Description of Artificial Sequence: Synthetic oligonucleotide
ccaggguuuacccagugggacagag

SEQ ID NO: 159680 - RNA, 25 nt, Artificial Sequence
  Description of Artificial Sequence: Synthetic oligonucleotide
agcaagguuuaaauuuguuauugug

SEQ ID NO: 159681 - RNA, 25 nt, Artificial Sequence
  Description of Artificial Sequence: Synthetic oligonucleotide
uguauuauguuguucaaaugcauuu

SEQ ID NO: 159682 - RNA, 25 nt, Artificial Sequence
  Description of Artificial Sequence: Synthetic oligonucleotide
uuuuaaucuuugugacaggaaagcc

SEQ ID NO: 159683 - RNA, 25 nt, Artificial Sequence
  Description of Artificial Sequence: Synthetic oligonucleotide
uuaaucuuugugacaggaaagcccu

SEQ ID NO: 159684 - RNA, 25 nt, Artificial Sequence
  Description of Artificial Sequence: Synthetic oligonucleotide
gcugcuuaugucucccagcauggcc

SEQ ID NO: 159685 - RNA, 25 nt, Artificial Sequence
  Description of Artificial Sequence: Synthetic oligonucleotide
aaguguuucagaagcuucucccuga

SEQ ID NO: 159686 - RNA, 25 nt, Artificial Sequence
  Description of Artificial Sequence: Synthetic oligonucleotide
gaccaucaauaaggaagaagcccuu

SEQ ID NO: 159687 - RNA, 25 nt, Artificial Sequence
  Description of Artificial Sequence: Synthetic oligonucleotide
ccaucaauaaggaagaagcccuuca

SEQ ID NO: 159688 - RNA, 25 nt, Artificial Sequence
  Description of Artificial Sequence: Synthetic oligonucleotide
ucaauaaggaagaagcccuucagcg

SEQ ID NO: 159689 - RNA, 25 nt, Artificial Sequence
  Description of Artificial Sequence: Synthetic oligonucleotide
aauaaggaagaagcccuucagcggc

SEQ ID NO: 159690 - RNA, 25 nt, Artificial Sequence
  Description of Artificial Sequence: Synthetic oligonucleotide
aggaagaagcccuucagcggccagu

SEQ ID NO: 159691 - RNA, 25 nt, Artificial Sequence
  Description of Artificial Sequence: Synthetic oligonucleotide
gcauaacuaaaggugaaaagcuccg

SEQ ID NO: 159692 - RNA, 25 nt, Artificial Sequence
  Description of Artificial Sequence: Synthetic oligonucleotide
cauaacuaaaggugaaaagcuccgg

SEQ ID NO: 159693 - RNA, 25 nt, Artificial Sequence
  Description of Artificial Sequence: Synthetic oligonucleotide
cuacaucacgccagucaacagucug

SEQ ID NO: 159694 - RNA, 25 nt, Artificial Sequence
  Description of Artificial Sequence: Synthetic oligonucleotide
acuggauuuaagcagaguucaaaag

SEQ ID NO: 159695 - RNA, 25 nt, Artificial Sequence
  Description of Artificial Sequence: Synthetic oligonucleotide
cuggauuuaagcagaguucaaaagc

SEQ ID NO: 159696 - RNA, 25 nt, Artificial Sequence
  Description of Artificial Sequence: Synthetic oligonucleotide
gauuuaagcagaguucaaaagcccu

SEQ ID NO: 159697 - RNA, 25 nt, Artificial Sequence
  Description of Artificial Sequence: Synthetic oligonucleotide
auuuaagcagaguucaaaagcccuu

SEQ ID NO: 159698 - RNA, 25 nt, Artificial Sequence
  Description of Artificial Sequence: Synthetic oligonucleotide
uuaagcagaguucaaaagcccuuca

SEQ ID NO: 159699 - RNA, 25 nt, Artificial Sequence
  Description of Artificial Sequence: Synthetic oligonucleotide
uaagcagaguucaaaagcccuucag

SEQ ID NO: 159700 - RNA, 25 nt, Artificial Sequence
  Description of Artificial Sequence: Synthetic oligonucleotide
agcagaguucaaaagcccuucagcg

SEQ ID NO: 159701 - RNA, 25 nt, Artificial Sequence
  Description of Artificial Sequence: Synthetic oligonucleotide
cucagggucugagugaagccgcucg

SEQ ID NO: 159702 - RNA, 25 nt, Artificial Sequence
  Description of Artificial Sequence: Synthetic oligonucleotide
caagcaacuacaucacgccagucaa

SEQ ID NO: 159703 - RNA, 25 nt, Artificial Sequence
  Description of Artificial Sequence: Synthetic oligonucleotide
aucaauggcagcuucuuggugcgug

SEQ ID NO: 159704 - RNA, 25 nt, Artificial Sequence
  Description of Artificial Sequence: Synthetic oligonucleotide
uuccagcccacauuggauucaucag

SEQ ID NO: 159705 - RNA, 25 nt, Artificial Sequence
  Description of Artificial Sequence: Synthetic oligonucleotide
cagcugagaauguggaauaccuaag

SEQ ID NO: 159706 - RNA, 25 nt, Artificial Sequence
  Description of Artificial Sequence: Synthetic oligonucleotide
aacguaucuccuaauuugaggcuca

SEQ ID NO: 159707 - RNA, 25 nt, Artificial Sequence
  Description of Artificial Sequence: Synthetic oligonucleotide
ccuaaaauaauuucucuacaauugg

SEQ ID NO: 159708 - RNA, 25 nt, Artificial Sequence
  Description of Artificial Sequence: Synthetic oligonucleotide
uggaagauucagcuaguuaggagcc

SEQ ID NO: 159709 - RNA, 25 nt, Artificial Sequence
  Description of Artificial Sequence: Synthetic oligonucleotide
uuaaacucuccuagucaauauccac

SEQ ID NO: 159710 - RNA, 25 nt, Artificial Sequence
  Description of Artificial Sequence: Synthetic oligonucleotide
cagccuacaguuauguucagucaca

SEQ ID NO: 159711 - RNA, 25 nt, Artificial Sequence
  Description of Artificial Sequence: Synthetic oligonucleotide
guuauguucagucacacacacauac

SEQ ID NO: 159712 - RNA, 25 nt, Artificial Sequence
  Description of Artificial Sequence: Synthetic oligonucleotide
cacauacaaaauguuccuuuugcuu

SEQ ID NO: 159713 - RNA, 25 nt, Artificial Sequence
  Description of Artificial Sequence: Synthetic oligonucleotide
uccuuuugcuuuuaaaguaauuuuu

SEQ ID NO: 159714 - RNA, 25 nt, Artificial Sequence
  Description of Artificial Sequence: Synthetic oligonucleotide
ugaccugugaagcaacagucaaugg

SEQ ID NO: 159715 - RNA, 25 nt, Artificial Sequence
  Description of Artificial Sequence: Synthetic oligonucleotide
cuaucucacacaucgacaaaccaau

SEQ ID NO: 159716 - RNA, 25 nt, Artificial Sequence
  Description of Artificial Sequence: Synthetic oligonucleotide
uguccucaauuguacugcuaccacu

SEQ ID NO: 159717 - RNA, 25 nt, Artificial Sequence
  Description of Artificial Sequence: Synthetic oligonucleotide
aaaccguagcuggcaagcggucuua

SEQ ID NO: 159718 - RNA, 25 nt, Artificial Sequence
  Description of Artificial Sequence: Synthetic oligonucleotide
uagcuggcaagcggucuuaccggcu

SEQ ID NO: 159719 - RNA, 25 nt, Artificial Sequence
  Description of Artificial Sequence: Synthetic oligonucleotide
uuguaugguuaaaagauggguuacc

SEQ ID NO: 159720 - RNA, 25 nt, Artificial Sequence
  Description of Artificial Sequence: Synthetic oligonucleotide
ugguuaaaagauggguuaccugcga

SEQ ID NO: 159721 - RNA, 25 nt, Artificial Sequence
  Description of Artificial Sequence: Synthetic oligonucleotide
cagggaauuauacaaucuugcugag

SEQ ID NO: 159722 - RNA, 25 nt, Artificial Sequence
  Description of Artificial Sequence: Synthetic oligonucleotide
acaaucuugcugagcauaaaacagu

SEQ ID NO: 159723 - RNA, 25 nt, Artificial Sequence
  Description of Artificial Sequence: Synthetic oligonucleotide
ccaauaaugaagaguccuuuauccu

SEQ ID NO: 159724 - RNA, 25 nt, Artificial Sequence
  Description of Artificial Sequence: Synthetic oligonucleotide
acuuuggauguuccaacgcaaguug

SEQ ID NO: 159725 - RNA, 25 nt, Artificial Sequence
  Description of Artificial Sequence: Synthetic oligonucleotide
aaugcuuccacuaaacugaaaccau

SEQ ID NO: 159726 - RNA, 25 nt, Artificial Sequence
  Description of Artificial Sequence: Synthetic oligonucleotide
gagaaaguuugacuuuguuaaauau

SEQ ID NO: 159727 - RNA, 25 nt, Artificial Sequence
  Description of Artificial Sequence: Synthetic oligonucleotide
aaagaacuacuguauauuaaaaguu

SEQ ID NO: 159728 - RNA, 25 nt, Artificial Sequence
  Description of Artificial Sequence: Synthetic oligonucleotide
uuagaaauacggguuuugacuuaac

SEQ ID NO: 159729 - RNA, 25 nt, Artificial Sequence
  Description of Artificial Sequence: Synthetic oligonucleotide
aacauggguacagcaaacucagcac

SEQ ID NO: 159730 - RNA, 25 nt, Artificial Sequence
  Description of Artificial Sequence: Synthetic oligonucleotide
aaagacacagaagaugcugaccuca

SEQ ID NO: 159731 - RNA, 25 nt, Artificial Sequence
  Description of Artificial Sequence: Synthetic oligonucleotide
uaguagggagguuuauucagaucgc

SEQ ID NO: 159732 - RNA, 25 nt, Artificial Sequence
  Description of Artificial Sequence: Synthetic oligonucleotide
gccuucugcagcaggguucugggau

SEQ ID NO: 159733 - RNA, 25 nt, Artificial Sequence
  Description of Artificial Sequence: Synthetic oligonucleotide
ggucugguacauauuggaaauuaug

SEQ ID NO: 159734 - RNA, 25 nt, Artificial Sequence
  Description of Artificial Sequence: Synthetic oligonucleotide
cuaguccuuccgauggaagcacuag

SEQ ID NO: 159735 - RNA, 25 nt, Artificial Sequence
  Description of Artificial Sequence: Synthetic oligonucleotide
ccagugaauauuguuuuuaugugga

SEQ ID NO: 159736 - RNA, 25 nt, Artificial Sequence
  Description of Artificial Sequence: Synthetic oligonucleotide
augaauucaaguuggaauugguaga

SEQ ID NO: 159737 - RNA, 25 nt, Artificial Sequence
  Description of Artificial Sequence: Synthetic oligonucleotide
caggacacagauuuagacuuggaga

SEQ ID NO: 159738 - RNA, 25 nt, Artificial Sequence
  Description of Artificial Sequence: Synthetic oligonucleotide
cucaaagcacaguuacaguauucca

SEQ ID NO: 159739 - RNA, 25 nt, Artificial Sequence
  Description of Artificial Sequence: Synthetic oligonucleotide
accacugccaccacugaugaauuaa

SEQ ID NO: 159740 - RNA, 25 nt, Artificial Sequence
  Description of Artificial Sequence: Synthetic oligonucleotide
gaaacuacuagugccacaucaucac

SEQ ID NO: 159741 - RNA, 25 nt, Artificial Sequence
  Description of Artificial Sequence: Synthetic oligonucleotide
aagucggacagccucaccaaacaga

SEQ ID NO: 159742 - RNA, 25 nt, Artificial Sequence
  Description of Artificial Sequence: Synthetic oligonucleotide
gaaagcgaaaaauggaacaugaugg

SEQ ID NO: 159743 - RNA, 25 nt, Artificial Sequence
  Description of Artificial Sequence: Synthetic oligonucleotide
cccucugauuuagcauguagacugc

SEQ ID NO: 159744 - RNA, 25 nt, Artificial Sequence
  Description of Artificial Sequence: Synthetic oligonucleotide
ugagcuauuuaaggaucuauuuaug

SEQ ID NO: 159745 - RNA, 25 nt, Artificial Sequence
  Description of Artificial Sequence: Synthetic oligonucleotide
aaaaggugaaaaagcacuauuauca

SEQ ID NO: 159746 - RNA, 25 nt, Artificial Sequence
  Description of Artificial Sequence: Synthetic oligonucleotide
gaaaaagcacuauuaucaguucugc

SEQ ID NO: 159747 - RNA, 25 nt, Artificial Sequence
  Description of Artificial Sequence: Synthetic oligonucleotide
ggcugaaaagaaagauuaaaccuac

SEQ ID NO: 159748 - RNA, 25 nt, Artificial Sequence
  Description of Artificial Sequence: Synthetic oligonucleotide
uaaacccuuauaauaaaauccuucu

SEQ ID NO: 159749 - RNA, 25 nt, Artificial Sequence
  Description of Artificial Sequence: Synthetic oligonucleotide
cauacuauuagccaaugcuguagac

SEQ ID NO: 159750 - RNA, 25 nt, Artificial Sequence
  Description of Artificial Sequence: Synthetic oligonucleotide
gacagaagcauuuugauaggaauag

SEQ ID NO: 159751 - RNA, 25 nt, Artificial Sequence
  Description of Artificial Sequence: Synthetic oligonucleotide
agagcaaauaagauaauggcccuga

SEQ ID NO: 159752 - RNA, 25 nt, Artificial Sequence
  Description of Artificial Sequence: Synthetic oligonucleotide
ccaacauuuuucucuuccucaagca

SEQ ID NO: 159753 - RNA, 25 nt, Artificial Sequence
  Description of Artificial Sequence: Synthetic oligonucleotide
uuaaguaugagaaaaguucagccca

SEQ ID NO: 159754 - RNA, 25 nt, Artificial Sequence
  Description of Artificial Sequence: Synthetic oligonucleotide
caggaauaaagauggcugcugaacc

SEQ ID NO: 159755 - RNA, 25 nt, Artificial Sequence
  Description of Artificial Sequence: Synthetic oligonucleotide
aauuugaaugaccaaguucucuuca

SEQ ID NO: 159756 - RNA, 25 nt, Artificial Sequence
  Description of Artificial Sequence: Synthetic oligonucleotide
auguauaaagauagccagccuagag

SEQ ID NO: 159757 - RNA, 25 nt, Artificial Sequence
  Description of Artificial Sequence: Synthetic oligonucleotide
ggcuguaacuaucucugugaagugu

SEQ ID NO: 159758 - RNA, 25 nt, Artificial Sequence
  Description of Artificial Sequence: Synthetic oligonucleotide
ucugugaagugugagaaaauuucaa

SEQ ID NO: 159759 - RNA, 25 nt, Artificial Sequence
  Description of Artificial Sequence: Synthetic oligonucleotide
ccuuuaaggaaaugaauccuccuga

SEQ ID NO: 159760 - RNA, 25 nt, Artificial Sequence
  Description of Artificial Sequence: Synthetic oligonucleotide
aaggauacaaaaagugacaucauau

SEQ ID NO: 159761 - RNA, 25 nt, Artificial Sequence
  Description of Artificial Sequence: Synthetic oligonucleotide
agaugcaauuugaaucuucaucaua

SEQ ID NO: 159762 - RNA, 25 nt, Artificial Sequence
  Description of Artificial Sequence: Synthetic oligonucleotide
guucaaaacgaagacuagcuauuaa

SEQ ID NO: 159763 - RNA, 25 nt, Artificial Sequence
  Description of Artificial Sequence: Synthetic oligonucleotide
gugaaaccucaucucuacuaaaaau

SEQ ID NO: 159764 - RNA, 25 nt, Artificial Sequence
  Description of Artificial Sequence: Synthetic oligonucleotide
acgaaagagaagcucuaucucgccu

SEQ ID NO: 159765 - RNA, 25 nt, Artificial Sequence
  Description of Artificial Sequence: Synthetic oligonucleotide
cuccacaagcgccuucgguccaguu

SEQ ID NO: 159766 - RNA, 25 nt, Artificial Sequence
  Description of Artificial Sequence: Synthetic oligonucleotide
gagaagauuccaaagauguagccgc

SEQ ID NO: 159767 - RNA, 25 nt, Artificial Sequence
  Description of Artificial Sequence: Synthetic oligonucleotide
aaucuggauucaaugaggagacuug

SEQ ID NO: 159768 - RNA, 25 nt, Artificial Sequence
  Description of Artificial Sequence: Synthetic oligonucleotide
agaacagauuugagaguagugagga

SEQ ID NO: 159769 - RNA, 25 nt, Artificial Sequence
  Description of Artificial Sequence: Synthetic oligonucleotide
ccagagcugugcagaugaguacaaa

SEQ ID NO: 159770 - RNA, 25 nt, Artificial Sequence
  Description of Artificial Sequence: Synthetic oligonucleotide
ccucagauuguuguuguuaaugggc

SEQ ID NO: 159771 - RNA, 25 nt, Artificial Sequence
  Description of Artificial Sequence: Synthetic oligonucleotide
cuauuuuaauuauuuuuaauuuauu

SEQ ID NO: 159772 - RNA, 25 nt, Artificial Sequence
  Description of Artificial Sequence: Synthetic oligonucleotide
uuuaauuuauuaauauuuaaauaug

SEQ ID NO: 159773 - RNA, 25 nt, Artificial Sequence
  Description of Artificial Sequence: Synthetic oligonucleotide
augcaguuugaauauccuuuguuuc

SEQ ID NO: 159774 - RNA, 25 nt, Artificial Sequence
  Description of Artificial Sequence: Synthetic oligonucleotide
caugcugcuggcgucuaaguguuug

SEQ ID NO: 159775 - RNA, 25 nt, Artificial Sequence
  Description of Artificial Sequence: Synthetic oligonucleotide
agaugugcauuucaccugugacaaa

SEQ ID NO: 159776 - RNA, 25 nt, Artificial Sequence
  Description of Artificial Sequence: Synthetic oligonucleotide
ucaaaaccugugccaggcugaauua

SEQ ID NO: 159777 - RNA, 25 nt, Artificial Sequence
  Description of Artificial Sequence: Synthetic oligonucleotide
gaauguggguagucauucuuacaau

SEQ ID NO: 159778 - RNA, 25 nt, Artificial Sequence
  Description of Artificial Sequence: Synthetic oligonucleotide
auguggguagucauucuuacaauug

SEQ ID NO: 159779 - RNA, 25 nt, Artificial Sequence
  Description of Artificial Sequence: Synthetic oligonucleotide
ugaaaaugagcaucagagaguguac

SEQ ID NO: 159780 - RNA, 25 nt, Artificial Sequence
  Description of Artificial Sequence: Synthetic oligonucleotide
uugcuuuucauguagaacucagcag

SEQ ID NO: 159781 - RNA, 25 nt, Artificial Sequence
  Description of Artificial Sequence: Synthetic oligonucleotide
uguauuucuauauuuauuuucagua

SEQ ID NO: 159782 - RNA, 25 nt, Artificial Sequence
  Description of Artificial Sequence: Synthetic oligonucleotide
uuugauuaauguuucuuaaauggaa

SEQ ID NO: 159783 - RNA, 25 nt, Artificial Sequence
  Description of Artificial Sequence: Synthetic oligonucleotide
caacguguauagugccuaaaauugu

SEQ ID NO: 159784 - RNA, 25 nt, Artificial Sequence
  Description of Artificial Sequence: Synthetic oligonucleotide
cauauccuuggcuacuaacaucugg

SEQ ID NO: 159785 - RNA, 25 nt, Artificial Sequence
  Description of Artificial Sequence: Synthetic oligonucleotide
uacuaacaucuggagacugugagcu

SEQ ID NO: 159786 - RNA, 25 nt, Artificial Sequence
  Description of Artificial Sequence: Synthetic oligonucleotide
cauaaguugugugcuuuuuauuaau

SEQ ID NO: 159787 - RNA, 25 nt, Artificial Sequence
  Description of Artificial Sequence: Synthetic oligonucleotide
gcaucauuuuggcucuucuuacauu

SEQ ID NO: 159788 - RNA, 25 nt, Artificial Sequence
  Description of Artificial Sequence: Synthetic oligonucleotide
gcucuucuuacauuuguaaaaaugu

SEQ ID NO: 159789 - RNA, 25 nt, Artificial Sequence
  Description of Artificial Sequence: Synthetic oligonucleotide
agauuaggucaucuuaauucauauu

SEQ ID NO: 159790 - RNA, 25 nt, Artificial Sequence
  Description of Artificial Sequence: Synthetic oligonucleotide
auggaauugaaagaacuaaucauga

SEQ ID NO: 159791 - RNA, 25 nt, Artificial Sequence
  Description of Artificial Sequence: Synthetic oligonucleotide
cacacucauuccuucugcucuuggg

SEQ ID NO: 159792 - RNA, 25 nt, Artificial Sequence
  Description of Artificial Sequence: Synthetic oligonucleotide
uguagagguaaccaguagcuuugag

SEQ ID NO: 159793 - RNA, 25 nt, Artificial Sequence
  Description of Artificial Sequence: Synthetic oligonucleotide
caaccacaugccacguaauauuuca

SEQ ID NO: 159794 - RNA, 25 nt, Artificial Sequence
  Description of Artificial Sequence: Synthetic oligonucleotide
ucggaaacaaguuauucucuucacu

SEQ ID NO: 159795 - RNA, 25 nt, Artificial Sequence
  Description of Artificial Sequence: Synthetic oligonucleotide
acucccaauaacuaaugcuaagaaa

SEQ ID NO: 159796 - RNA, 25 nt, Artificial Sequence
  Description of Artificial Sequence: Synthetic oligonucleotide
aaugcuaagaaaugcugaaaaucaa

SEQ ID NO: 159797 - RNA, 25 nt, Artificial Sequence
  Description of Artificial Sequence: Synthetic oligonucleotide
gucuuucucuaaauaugauuacuuu

SEQ ID NO: 159798 - RNA, 25 nt, Artificial Sequence
  Description of Artificial Sequence: Synthetic oligonucleotide
ugaauuucaggcauuuuguucuaca

SEQ ID NO: 159799 - RNA, 25 nt, Artificial Sequence
  Description of Artificial Sequence: Synthetic oligonucleotide
cgauucccucucacccgggacucuc

SEQ ID NO: 159800 - RNA, 25 nt, Artificial Sequence
  Description of Artificial Sequence: Synthetic oligonucleotide
aggaaagugaaccuuuaaaguaaag

SEQ ID NO: 159801 - RNA, 25 nt, Artificial Sequence
  Description of Artificial Sequence: Synthetic oligonucleotide
gaggcugcaugcucuggaagccugg

SEQ ID NO: 159802 - RNA, 25 nt, Artificial Sequence
  Description of Artificial Sequence: Synthetic oligonucleotide
ucucugaacagaaaacaaaagagag

SEQ ID NO: 159803 - RNA, 25 nt, Artificial Sequence
  Description of Artificial Sequence: Synthetic oligonucleotide
aacuuggcuguaaucaguuaugccg

SEQ ID NO: 159804 - RNA, 25 nt, Artificial Sequence
  Description of Artificial Sequence: Synthetic oligonucleotide
agaagccaaaauuaaaagaagucca

SEQ ID NO: 159805 - RNA, 25 nt, Artificial Sequence
  Description of Artificial Sequence: Synthetic oligonucleotide
auuaaaagaaguccaggugagguua

SEQ ID NO: 159806 - RNA, 25 nt, Artificial Sequence
  Description of Artificial Sequence: Synthetic oligonucleotide
gaauccggauuaucgggaagaggac

SEQ ID NO: 159807 - RNA, 25 nt, Artificial Sequence
  Description of Artificial Sequence: Synthetic oligonucleotide
aaugugacaucaaagcaaguauugu

SEQ ID NO: 159808 - RNA, 25 nt, Artificial Sequence
  Description of Artificial Sequence: Synthetic oligonucleotide
caucaaagcaaguauuguagcacuc

SEQ ID NO: 159809 - RNA, 25 nt, Artificial Sequence
  Description of Artificial Sequence: Synthetic oligonucleotide
agagagagaaaacaaaaccacaaau

SEQ ID NO: 159810 - RNA, 25 nt, Artificial Sequence
  Description of Artificial Sequence: Synthetic oligonucleotide
ucgcuguaguauuuaagcccauaca

SEQ ID NO: 159811 - RNA, 25 nt, Artificial Sequence
  Description of Artificial Sequence: Synthetic oligonucleotide
cgcuguaguauuuaagcccauacag

SEQ ID NO: 159812 - RNA, 25 nt, Artificial Sequence
  Description of Artificial Sequence: Synthetic oligonucleotide
auuuaagcccauacagaaaccuucc

SEQ ID NO: 159813 - RNA, 25 nt, Artificial Sequence
  Description of Artificial Sequence: Synthetic oligonucleotide
auuaaaauaaacaugguauaccuac

SEQ ID NO: 159814 - RNA, 25 nt, Artificial Sequence
  Description of Artificial Sequence: Synthetic oligonucleotide
cuguucugaucggccaguuuucgga

SEQ ID NO: 159815 - RNA, 25 nt, Artificial Sequence
  Description of Artificial Sequence: Synthetic oligonucleotide
aaauaauuugaacuuuggaacaggg

SEQ ID NO: 159816 - RNA, 25 nt, Artificial Sequence
  Description of Artificial Sequence: Synthetic oligonucleotide
ugcgaccuuaauuuaacuuuccagu

SEQ ID NO: 159817 - RNA, 25 nt, Artificial Sequence
  Description of Artificial Sequence: Synthetic oligonucleotide
cugagaaagcuaaaguuugguuuug

SEQ ID NO: 159818 - RNA, 25 nt, Artificial Sequence
  Description of Artificial Sequence: Synthetic oligonucleotide
aguaaagaugcuacuucccacugua

SEQ ID NO: 159819 - RNA, 25 nt, Artificial Sequence
  Description of Artificial Sequence: Synthetic oligonucleotide
cugcuuaauugcugauaccauauga

SEQ ID NO: 159820 - RNA, 25 nt, Artificial Sequence
  Description of Artificial Sequence: Synthetic oligonucleotide
uaccauaugaaugaaacaugggcug

SEQ ID NO: 159821 - RNA, 25 nt, Artificial Sequence
  Description of Artificial Sequence: Synthetic oligonucleotide
aacuuucuuauccaacuuuuucaua

SEQ ID NO: 159822 - RNA, 25 nt, Artificial Sequence
  Description of Artificial Sequence: Synthetic oligonucleotide
ccuugcaugacaucaugaggccgga

SEQ ID NO: 159823 - RNA, 25 nt, Artificial Sequence
  Description of Artificial Sequence: Synthetic oligonucleotide
ugaauuuguauaugacugcauuugu

SEQ ID NO: 159824 - RNA, 25 nt, Artificial Sequence
  Description of Artificial Sequence: Synthetic oligonucleotide
gaauccuaguagaauguuuacuacc

SEQ ID NO: 159825 - RNA, 25 nt, Artificial Sequence
  Description of Artificial Sequence: Synthetic oligonucleotide
gaaagggaagaauuuuuugaugaaa

SEQ ID NO: 159826 - RNA, 25 nt, Artificial Sequence
  Description of Artificial Sequence: Synthetic oligonucleotide
uaucggcaugccagugugugaauuu

SEQ ID NO: 159827 - RNA, 25 nt, Artificial Sequence
  Description of Artificial Sequence: Synthetic oligonucleotide
caccucauaguagagcaauguaugu

SEQ ID NO: 159828 - RNA, 25 nt, Artificial Sequence
  Description of Artificial Sequence: Synthetic oligonucleotide
ccagaauugccaaagcacauauaua

SEQ ID NO: 159829 - RNA, 25 nt, Artificial Sequence
  Description of Artificial Sequence: Synthetic oligonucleotide
uggugaucuggguaauaguuucucc

SEQ ID NO: 159830 - RNA, 25 nt, Artificial Sequence
  Description of Artificial Sequence: Synthetic oligonucleotide
gaucuggguaauaguuucuccaaau

SEQ ID NO: 159831 - RNA, 25 nt, Artificial Sequence
  Description of Artificial Sequence: Synthetic oligonucleotide
ggaugugaugaauacuuccuagaaa

SEQ ID NO: 159832 - RNA, 25 nt, Artificial Sequence
  Description of Artificial Sequence: Synthetic oligonucleotide
cauuuccacagcuacaccauauaug

SEQ ID NO: 159833 - RNA, 25 nt, Artificial Sequence
  Description of Artificial Sequence: Synthetic oligonucleotide
acagcuacaccauauaugaauggag

SEQ ID NO: 159834 - RNA, 25 nt, Artificial Sequence
  Description of Artificial Sequence: Synthetic oligonucleotide
ugcaguucuuacacgagaagaagau

SEQ ID NO: 159835 - RNA, 25 nt, Artificial Sequence
  Description of Artificial Sequence: Synthetic oligonucleotide
acgagaagaagaucauuuacaggga

SEQ ID NO: 159836 - RNA, 25 nt, Artificial Sequence
  Description of Artificial Sequence: Synthetic oligonucleotide
cgagaagaagaucauuuacagggac

SEQ ID NO: 159837 - RNA, 25 nt, Artificial Sequence
  Description of Artificial Sequence: Synthetic oligonucleotide
aagaagaucauuuacagggaccuga

SEQ ID NO: 159838 - RNA, 25 nt, Artificial Sequence
  Description of Artificial Sequence: Synthetic oligonucleotide
agaggaagagguguuugacugcauc

SEQ ID NO: 159839 - RNA, 25 nt, Artificial Sequence
  Description of Artificial Sequence: Synthetic oligonucleotide
gaggaagagguguuugacugcaucg

SEQ ID NO: 159840 - RNA, 25 nt, Artificial Sequence
  Description of Artificial Sequence: Synthetic oligonucleotide
cuacuuugagggcgaguucacaggg

SEQ ID NO: 159841 - RNA, 25 nt, Artificial Sequence
  Description of Artificial Sequence: Synthetic oligonucleotide
agggcaucuccuggcaccucugucc

SEQ ID NO: 159842 - RNA, 25 nt, Artificial Sequence
  Description of Artificial Sequence: Synthetic oligonucleotide
ggagugauaugguuugucuuuuuaa

SEQ ID NO: 159843 - RNA, 25 nt, Artificial Sequence
  Description of Artificial Sequence: Synthetic oligonucleotide
gagugauaugguuugucuuuuuaag

SEQ ID NO: 159844 - RNA, 25 nt, Artificial Sequence
  Description of Artificial Sequence: Synthetic oligonucleotide
ugcaguaaagauccuaaagguuguc

SEQ ID NO: 159845 - RNA, 25 nt, Artificial Sequence
  Description of Artificial Sequence: Synthetic oligonucleotide
aguaaagauccuaaagguugucgac

SEQ ID NO: 159846 - RNA, 25 nt, Artificial Sequence
  Description of Artificial Sequence: Synthetic oligonucleotide
ugacaaaggacaaccuggcaauugu

SEQ ID NO: 159847 - RNA, 25 nt, Artificial Sequence
  Description of Artificial Sequence: Synthetic oligonucleotide
gcaauugugacccaguggugcgagg

SEQ ID NO: 159848 - RNA, 25 nt, Artificial Sequence
  Description of Artificial Sequence: Synthetic oligonucleotide
aacaucauccauagagacaugaaau

SEQ ID NO: 159849 - RNA, 25 nt, Artificial Sequence
  Description of Artificial Sequence: Synthetic oligonucleotide
ugaaauccaacaauauauuucucca

SEQ ID NO: 159850 - RNA, 25 nt, Artificial Sequence
  Description of Artificial Sequence: Synthetic oligonucleotide
aacaauauauuucuccaugaaggcu

SEQ ID NO: 159851 - RNA, 25 nt, Artificial Sequence
  Description of Artificial Sequence: Synthetic oligonucleotide
aacaguaaagucacgcuggaguggu

SEQ ID NO: 159852 - RNA, 25 nt, Artificial Sequence
  Description of Artificial Sequence: Synthetic oligonucleotide
ugugaagaaaguaaaggaagagagg

SEQ ID NO: 159853 - RNA, 25 nt, Artificial Sequence
  Description of Artificial Sequence: Synthetic oligonucleotide
cuuccgagccauccuugcaucgggc

SEQ ID NO: 159854 - RNA, 25 nt, Artificial Sequence
  Description of Artificial Sequence: Synthetic oligonucleotide
aauggagguugaauauccuacugug

SEQ ID NO: 159855 - RNA, 25 nt, Artificial Sequence
  Description of Artificial Sequence: Synthetic oligonucleotide
ggagguugaauauccuacuguguaa

SEQ ID NO: 159856 - RNA, 25 nt, Artificial Sequence
  Description of Artificial Sequence: Synthetic oligonucleotide
auuuugaguuuucccuuguagugua

SEQ ID NO: 159857 - RNA, 25 nt, Artificial Sequence
  Description of Artificial Sequence: Synthetic oligonucleotide
uauccuguuuguucuuuguugauug

SEQ ID NO: 159858 - RNA, 25 nt, Artificial Sequence
  Description of Artificial Sequence: Synthetic oligonucleotide
ccuguuuguucuuuguugauugaaa

SEQ ID NO: 159859 - RNA, 25 nt, Artificial Sequence
  Description of Artificial Sequence: Synthetic oligonucleotide
cucuacagccuucuuuuucuuccau

SEQ ID NO: 159860 - RNA, 25 nt, Artificial Sequence
  Description of Artificial Sequence: Synthetic oligonucleotide
ucuuccauagcuaaucuuccuucua

SEQ ID NO: 159861 - RNA, 25 nt, Artificial Sequence
  Description of Artificial Sequence: Synthetic oligonucleotide
auaaucuuccuguugaaugcuucau

SEQ ID NO: 159862 - RNA, 25 nt, Artificial Sequence
  Description of Artificial Sequence: Synthetic oligonucleotide
uaaucuuccuguugaaugcuucaug

SEQ ID NO: 159863 - RNA, 25 nt, Artificial Sequence
  Description of Artificial Sequence: Synthetic oligonucleotide
cuucaugacuugaauucuacuuuga

SEQ ID NO: 159864 - RNA, 25 nt, Artificial Sequence
  Description of Artificial Sequence: Synthetic oligonucleotide
aagagggagagaagcaacuacagac

SEQ ID NO: 159865 - RNA, 25 nt, Artificial Sequence
  Description of Artificial Sequence: Synthetic oligonucleotide
cgucuccuaccagaccaaggucaac

SEQ ID NO: 159866 - RNA, 25 nt, Artificial Sequence
  Description of Artificial Sequence: Synthetic oligonucleotide
gaucaaucggcccgacuaucucgac

SEQ ID NO: 159867 - RNA, 25 nt, Artificial Sequence
  Description of Artificial Sequence: Synthetic oligonucleotide
ggacgaacauccaaccuucccaaac

SEQ ID NO: 159868 - RNA, 25 nt, Artificial Sequence
  Description of Artificial Sequence: Synthetic oligonucleotide
agggucggaacccaagcuuagaacu

SEQ ID NO: 159869 - RNA, 25 nt, Artificial Sequence
  Description of Artificial Sequence: Synthetic oligonucleotide
ucggaacccaagcuuagaacuuuaa

SEQ ID NO: 159870 - RNA, 25 nt, Artificial Sequence
  Description of Artificial Sequence: Synthetic oligonucleotide
acccaagcuuagaacuuuaagcaac

SEQ ID NO: 159871 - RNA, 25 nt, Artificial Sequence
  Description of Artificial Sequence: Synthetic oligonucleotide
gaacuuuaagcaacaagaccaccac

SEQ ID NO: 159872 - RNA, 25 nt, Artificial Sequence
  Description of Artificial Sequence: Synthetic oligonucleotide
acuauucaguggcgagaaauaaagu

SEQ ID NO: 159873 - RNA, 25 nt, Artificial Sequence
  Description of Artificial Sequence: Synthetic oligonucleotide
cuauucaguggcgagaaauaaaguu

SEQ ID NO: 159874 - RNA, 25 nt, Artificial Sequence
  Description of Artificial Sequence: Synthetic oligonucleotide
aaacacagauaacaggaaaugaucc

SEQ ID NO: 159875 - RNA, 25 nt, Artificial Sequence
  Description of Artificial Sequence: Synthetic oligonucleotide
cuuaagaaaagagaagaaaugaaac

SEQ ID NO: 159876 - RNA, 25 nt, Artificial Sequence
  Description of Artificial Sequence: Synthetic oligonucleotide
cugaaggaguguguuuccauccucc

SEQ ID NO: 159877 - RNA, 25 nt, Artificial Sequence
  Description of Artificial Sequence: Synthetic oligonucleotide
ucaccgcgggacugaaaaucuuuga

SEQ ID NO: 159878 - RNA, 25 nt, Artificial Sequence
  Description of Artificial Sequence: Synthetic oligonucleotide
agcagaaauaagcgugccguucagg

SEQ ID NO: 159879 - RNA, 25 nt, Artificial Sequence
  Description of Artificial Sequence: Synthetic oligonucleotide
aagcgugccguucaggguccagaag

SEQ ID NO: 159880 - RNA, 25 nt, Artificial Sequence
  Description of Artificial Sequence: Synthetic oligonucleotide
agaaacagucacucaagacugcuug

SEQ ID NO: 159881 - RNA, 25 nt, Artificial Sequence
  Description of Artificial Sequence: Synthetic oligonucleotide
agaggaagaagguccaugucuuugg

SEQ ID NO: 159882 - RNA, 25 nt, Artificial Sequence
  Description of Artificial Sequence: Synthetic oligonucleotide
uguauucaaaauaugccugaaacac

SEQ ID NO: 159883 - RNA, 25 nt, Artificial Sequence
  Description of Artificial Sequence: Synthetic oligonucleotide
auuuuccucccuuucucuguaccuc

SEQ ID NO: 159884 - RNA, 25 nt, Artificial Sequence
  Description of Artificial Sequence: Synthetic oligonucleotide
caaagaaagauagagcaagacaaga

SEQ ID NO: 159885 - RNA, 25 nt, Artificial Sequence
  Description of Artificial Sequence: Synthetic oligonucleotide
aagaaagauagagcaagacaagaaa

SEQ ID NO: 159886 - RNA, 25 nt, Artificial Sequence
  Description of Artificial Sequence: Synthetic oligonucleotide
gaaagcauuuguuuguacaagaucc

SEQ ID NO: 159887 - RNA, 25 nt, Artificial Sequence
  Description of Artificial Sequence: Synthetic oligonucleotide
ugaguuaaacgaacguacuugcaga

SEQ ID NO: 159888 - RNA, 25 nt, Artificial Sequence
  Description of Artificial Sequence: Synthetic oligonucleotide
acugauacagaacgaucgauacaga

SEQ ID NO: 159889 - RNA, 25 nt, Artificial Sequence
  Description of Artificial Sequence: Synthetic oligonucleotide
auauuauauauauauaaaaauaaau

SEQ ID NO: 159890 - RNA, 25 nt, Artificial Sequence
  Description of Artificial Sequence: Synthetic oligonucleotide
auuauauauauauaaaaauaaauau

SEQ ID NO: 159891 - RNA, 25 nt, Artificial Sequence
  Description of Artificial Sequence: Synthetic oligonucleotide
ucacuggauguauuugacugcugug

SEQ ID NO: 159892 - RNA, 25 nt, Artificial Sequence
  Description of Artificial Sequence: Synthetic oligonucleotide
cagggaagaggaggagaugagagac

SEQ ID NO: 159893 - RNA, 25 nt, Artificial Sequence
  Description of Artificial Sequence: Synthetic oligonucleotide
augaucuuuuuuuugucccacuugg

SEQ ID NO: 159894 - RNA, 27 nt, Artificial Sequence
  Description of Artificial Sequence: Synthetic oligonucleotide
ggccgugaacuccucaucaaaauaccu

SEQ ID NO: 159895 - RNA, 27 nt, Artificial Sequence
  Description of Artificial Sequence: Synthetic oligonucleotide
uggugugauggugaucaucugggccgu

SEQ ID NO: 159896 - RNA, 27 nt, Artificial Sequence
  Description of Artificial Sequence: Synthetic oligonucleotide
aaacccgcaggauaguuuucuucccua

SEQ ID NO: 159897 - RNA, 27 nt, Artificial Sequence
  Description of Artificial Sequence: Synthetic oligonucleotide
caaacuggaugaaauaaauuaaaaccc

SEQ ID NO: 159898 - RNA, 27 nt, Artificial Sequence
  Description of Artificial Sequence: Synthetic oligonucleotide
agaaguccuuaacauuucccuacguga

SEQ ID NO: 159899 - RNA, 27 nt, Artificial Sequence
  Description of Artificial Sequence: Synthetic oligonucleotide
cucugucccacuggguaaacccuggcc

SEQ ID NO: 159900 - RNA, 27 nt, Artificial Sequence
  Description of Artificial Sequence: Synthetic oligonucleotide
cacaauaacaaauuuaaaccuugcucc

SEQ ID NO: 159901 - RNA, 27 nt, Artificial Sequence
  Description of Artificial Sequence: Synthetic oligonucleotide
aaaugcauuugaacaacauaauacaca

SEQ ID NO: 159902 - RNA, 27 nt, Artificial Sequence
  Description of Artificial Sequence: Synthetic oligonucleotide
ggcuuuccugucacaaagauuaaaaac

SEQ ID NO: 159903 - RNA, 27 nt, Artificial Sequence
  Description of Artificial Sequence: Synthetic oligonucleotide
agggcuuuccugucacaaagauuaaaa

SEQ ID NO: 159904 - RNA, 27 nt, Artificial Sequence
  Description of Artificial Sequence: Synthetic oligonucleotide
ggccaugcugggagacauaagcagcag

SEQ ID NO: 159905 - RNA, 27 nt, Artificial Sequence
  Description of Artificial Sequence: Synthetic oligonucleotide
ucagggagaagcuucugaaacacuucu

SEQ ID NO: 159906 - RNA, 27 nt, Artificial Sequence
  Description of Artificial Sequence: Synthetic oligonucleotide
aagggcuucuuccuuauugauggucag

SEQ ID NO: 159907 - RNA, 27 nt, Artificial Sequence
  Description of Artificial Sequence: Synthetic oligonucleotide
ugaagggcuucuuccuuauugaugguc

SEQ ID NO: 159908 - RNA, 27 nt, Artificial Sequence
  Description of Artificial Sequence: Synthetic oligonucleotide
cgcugaagggcuucuuccuuauugaug

SEQ ID NO: 159909 - RNA, 27 nt, Artificial Sequence
  Description of Artificial Sequence: Synthetic oligonucleotide
gccgcugaagggcuucuuccuuauuga

SEQ ID NO: 159910 - RNA, 27 nt, Artificial Sequence
  Description of Artificial Sequence: Synthetic oligonucleotide
acuggccgcugaagggcuucuuccuua

SEQ ID NO: 159911 - RNA, 27 nt, Artificial Sequence
  Description of Artificial Sequence: Synthetic oligonucleotide
cggagcuuuucaccuuuaguuaugcuu

SEQ ID NO: 159912 - RNA, 27 nt, Artificial Sequence
  Description of Artificial Sequence: Synthetic oligonucleotide
ccggagcuuuucaccuuuaguuaugcu

SEQ ID NO: 159913 - RNA, 27 nt, Artificial Sequence
  Description of Artificial Sequence: Synthetic oligonucleotide
cagacuguugacuggcgugauguaguu

SEQ ID NO: 159914 - RNA, 27 nt, Artificial Sequence
  Description of Artificial Sequence: Synthetic oligonucleotide
cuuuugaacucugcuuaaauccagugg

SEQ ID NO: 159915 - RNA, 27 nt, Artificial Sequence
  Description of Artificial Sequence: Synthetic oligonucleotide
gcuuuugaacucugcuuaaauccagug

SEQ ID NO: 159916 - RNA, 27 nt, Artificial Sequence
  Description of Artificial Sequence: Synthetic oligonucleotide
agggcuuuugaacucugcuuaaaucca

SEQ ID NO: 159917 - RNA, 27 nt, Artificial Sequence
  Description of Artificial Sequence: Synthetic oligonucleotide
aagggcuuuugaacucugcuuaaaucc

SEQ ID NO: 159918 - RNA, 27 nt, Artificial Sequence
  Description of Artificial Sequence: Synthetic oligonucleotide
ugaagggcuuuugaacucugcuuaaau

SEQ ID NO: 159919 - RNA, 27 nt, Artificial Sequence
  Description of Artificial Sequence: Synthetic oligonucleotide
cugaagggcuuuugaacucugcuuaaa

SEQ ID NO: 159920 - RNA, 27 nt, Artificial Sequence
  Description of Artificial Sequence: Synthetic oligonucleotide
cgcugaagggcuuuugaacucugcuua

SEQ ID NO: 159921 - RNA, 27 nt, Artificial Sequence
  Description of Artificial Sequence: Synthetic oligonucleotide
cgagcggcuucacucagacccugaggc

SEQ ID NO: 159922 - RNA, 27 nt, Artificial Sequence
  Description of Artificial Sequence: Synthetic oligonucleotide
uugacuggcgugauguaguugcuuggg

SEQ ID NO: 159923 - RNA, 27 nt, Artificial Sequence
  Description of Artificial Sequence: Synthetic oligonucleotide
cacgcaccaagaagcugccauugaucc

SEQ ID NO: 159924 - RNA, 27 nt, Artificial Sequence
  Description of Artificial Sequence: Synthetic oligonucleotide
cugaugaauccaaugugggcuggaauc

SEQ ID NO: 159925 - RNA, 27 nt, Artificial Sequence
  Description of Artificial Sequence: Synthetic oligonucleotide
cuuagguauuccacauucucagcugug

SEQ ID NO: 159926 - RNA, 27 nt, Artificial Sequence
  Description of Artificial Sequence: Synthetic oligonucleotide
ugagccucaaauuaggagauacguuuu

SEQ ID NO: 159927 - RNA, 27 nt, Artificial Sequence
  Description of Artificial Sequence: Synthetic oligonucleotide
ccaauuguagagaaauuauuuuaggaa

SEQ ID NO: 159928 - RNA, 27 nt, Artificial Sequence
  Description of Artificial Sequence: Synthetic oligonucleotide
ggcuccuaacuagcugaaucuuccaau

SEQ ID NO: 159929 - RNA, 27 nt, Artificial Sequence
  Description of Artificial Sequence: Synthetic oligonucleotide
guggauauugacuaggagaguuuaaaa

SEQ ID NO: 159930 - RNA, 27 nt, Artificial Sequence
  Description of Artificial Sequence: Synthetic oligonucleotide
ugugacugaacauaacuguaggcugaa

SEQ ID NO: 159931 - RNA, 27 nt, Artificial Sequence
  Description of Artificial Sequence: Synthetic oligonucleotide
guaugugugugugacugaacauaacug

SEQ ID NO: 159932 - RNA, 27 nt, Artificial Sequence
  Description of Artificial Sequence: Synthetic oligonucleotide
aagcaaaaggaacauuuuguaugugug

SEQ ID NO: 159933 - RNA, 27 nt, Artificial Sequence
  Description of Artificial Sequence: Synthetic oligonucleotide
aaaaauuacuuuaaaagcaaaaggaac

SEQ ID NO: 159934 - RNA, 27 nt, Artificial Sequence
  Description of Artificial Sequence: Synthetic oligonucleotide
ccauugacuguugcuucacaggucaga

SEQ ID NO: 159935 - RNA, 27 nt, Artificial Sequence
  Description of Artificial Sequence: Synthetic oligonucleotide
auugguuugucgaugugugagauaguu

SEQ ID NO: 159936 - RNA, 27 nt, Artificial Sequence
  Description of Artificial Sequence: Synthetic oligonucleotide
agugguagcaguacaauugaggacaag

SEQ ID NO: 159937 - RNA, 27 nt, Artificial Sequence
  Description of Artificial Sequence: Synthetic oligonucleotide
uaagaccgcuugccagcuacgguuuca

SEQ ID NO: 159938 - RNA, 27 nt, Artificial Sequence
  Description of Artificial Sequence: Synthetic oligonucleotide
agccgguaagaccgcuugccagcuacg

SEQ ID NO: 159939 - RNA, 27 nt, Artificial Sequence
  Description of Artificial Sequence: Synthetic oligonucleotide
gguaacccaucuuuuaaccauacaacu

SEQ ID NO: 159940 - RNA, 27 nt, Artificial Sequence
  Description of Artificial Sequence: Synthetic oligonucleotide
ucgcagguaacccaucuuuuaaccaua

SEQ ID NO: 159941 - RNA, 27 nt, Artificial Sequence
  Description of Artificial Sequence: Synthetic oligonucleotide
cucagcaagauuguauaauucccugca

SEQ ID NO: 159942 - RNA, 27 nt, Artificial Sequence
  Description of Artificial Sequence: Synthetic oligonucleotide
acuguuuuaugcucagcaagauuguau

SEQ ID NO: 159943 - RNA, 27 nt, Artificial Sequence
  Description of Artificial Sequence: Synthetic oligonucleotide
aggauaaaggacucuucauuauuggaa

SEQ ID NO: 159944 - RNA, 27 nt, Artificial Sequence
  Description of Artificial Sequence: Synthetic oligonucleotide
caacuugcguuggaacauccaaagugu

SEQ ID NO: 159945 - RNA, 27 nt, Artificial Sequence
  Description of Artificial Sequence: Synthetic oligonucleotide
augguuucaguuuaguggaagcauuua

SEQ ID NO: 159946 - RNA, 27 nt, Artificial Sequence
  Description of Artificial Sequence: Synthetic oligonucleotide
auauuuaacaaagucaaacuuucucac

SEQ ID NO: 159947 - RNA, 27 nt, Artificial Sequence
  Description of Artificial Sequence: Synthetic oligonucleotide
aacuuuuaauauacaguaguucuuuuc

SEQ ID NO: 159948 - RNA, 27 nt, Artificial Sequence
  Description of Artificial Sequence: Synthetic oligonucleotide
guuaagucaaaacccguauuucuaaag

SEQ ID NO: 159949 - RNA, 27 nt, Artificial Sequence
  Description of Artificial Sequence: Synthetic oligonucleotide
gugcugaguuugcuguacccauguuga

SEQ ID NO: 159950 - RNA, 27 nt, Artificial Sequence
  Description of Artificial Sequence: Synthetic oligonucleotide
ugaggucagcaucuucugugucuuuac

SEQ ID NO: 159951 - RNA, 27 nt, Artificial Sequence
  Description of Artificial Sequence: Synthetic oligonucleotide
gcgaucugaauaaaccucccuacuagc

SEQ ID NO: 159952 - RNA, 27 nt, Artificial Sequence
  Description of Artificial Sequence: Synthetic oligonucleotide
aucccagaacccugcugcagaaggcca

SEQ ID NO: 159953 - RNA, 27 nt, Artificial Sequence
  Description of Artificial Sequence: Synthetic oligonucleotide
cauaauuuccaauauguaccagaccuu

SEQ ID NO: 159954 - RNA, 27 nt, Artificial Sequence
  Description of Artificial Sequence: Synthetic oligonucleotide
cuagugcuuccaucggaaggacuaggu

SEQ ID NO: 159955 - RNA, 27 nt, Artificial Sequence
  Description of Artificial Sequence: Synthetic oligonucleotide
uccacauaaaaacaauauucacuggga

SEQ ID NO: 159956 - RNA, 27 nt, Artificial Sequence
  Description of Artificial Sequence: Synthetic oligonucleotide
ucuaccaauuccaacuugaauucauug

SEQ ID NO: 159957 - RNA, 27 nt, Artificial Sequence
  Description of Artificial Sequence: Synthetic oligonucleotide
ucuccaagucuaaaucuguguccugag

SEQ ID NO: 159958 - RNA, 27 nt, Artificial Sequence
  Description of Artificial Sequence: Synthetic oligonucleotide
uggaauacuguaacugugcuuugagga

SEQ ID NO: 159959 - RNA, 27 nt, Artificial Sequence
  Description of Artificial Sequence: Synthetic oligonucleotide
uuaauucaucagugguggcagugguag

SEQ ID NO: 159960 - RNA, 27 nt, Artificial Sequence
  Description of Artificial Sequence: Synthetic oligonucleotide
gugaugauguggcacuaguaguuucuu

SEQ ID NO: 159961 - RNA, 27 nt, Artificial Sequence
  Description of Artificial Sequence: Synthetic oligonucleotide
ucuguuuggugaggcuguccgacuuug

SEQ ID NO: 159962 - RNA, 27 nt, Artificial Sequence
  Description of Artificial Sequence: Synthetic oligonucleotide
ccaucauguuccauuuuucgcuuucuc

SEQ ID NO: 159963 - RNA, 27 nt, Artificial Sequence
  Description of Artificial Sequence: Synthetic oligonucleotide
gcagucuacaugcuaaaucagagggua

SEQ ID NO: 159964 - RNA, 27 nt, Artificial Sequence
  Description of Artificial Sequence: Synthetic oligonucleotide
cauaaauagauccuuaaauagcucaaa

SEQ ID NO: 159965 - RNA, 27 nt, Artificial Sequence
  Description of Artificial Sequence: Synthetic oligonucleotide
ugauaauagugcuuuuucaccuuuuuc

SEQ ID NO: 159966 - RNA, 27 nt, Artificial Sequence
  Description of Artificial Sequence: Synthetic oligonucleotide
gcagaacugauaauagugcuuuuucac

SEQ ID NO: 159967 - RNA, 27 nt, Artificial Sequence
  Description of Artificial Sequence: Synthetic oligonucleotide
guagguuuaaucuuucuuuucagccau

SEQ ID NO: 159968 - RNA, 27 nt, Artificial Sequence
  Description of Artificial Sequence: Synthetic oligonucleotide
agaaggauuuuauuauaaggguuuaau

SEQ ID NO: 159969 - RNA, 27 nt, Artificial Sequence
  Description of Artificial Sequence: Synthetic oligonucleotide
gucuacagcauuggcuaauaguaugaa

SEQ ID NO: 159970 - RNA, 27 nt, Artificial Sequence
  Description of Artificial Sequence: Synthetic oligonucleotide
cuauuccuaucaaaaugcuucugucua

SEQ ID NO: 159971 - RNA, 27 nt, Artificial Sequence
  Description of Artificial Sequence: Synthetic oligonucleotide
ucagggccauuaucuuauuugcucuau

SEQ ID NO: 159972 - RNA, 27 nt, Artificial Sequence
  Description of Artificial Sequence: Synthetic oligonucleotide
ugcuugaggaagagaaaaauguugguc

SEQ ID NO: 159973 - RNA, 27 nt, Artificial Sequence
  Description of Artificial Sequence: Synthetic oligonucleotide
ugggcugaacuuuucucauacuuaaag

SEQ ID NO: 159974 - RNA, 27 nt, Artificial Sequence
  Description of Artificial Sequence: Synthetic oligonucleotide
gguucagcagccaucuuuauuccugcg

SEQ ID NO: 159975 - RNA, 27 nt, Artificial Sequence
  Description of Artificial Sequence: Synthetic oligonucleotide
ugaagagaacuuggucauucaaauuuc

SEQ ID NO: 159976 - RNA, 27 nt, Artificial Sequence
  Description of Artificial Sequence: Synthetic oligonucleotide
cucuaggcuggcuaucuuuauacauac

SEQ ID NO: 159977 - RNA, 27 nt, Artificial Sequence
  Description of Artificial Sequence: Synthetic oligonucleotide
acacuucacagagauaguuacagccau

SEQ ID NO: 159978 - RNA, 27 nt, Artificial Sequence
  Description of Artificial Sequence: Synthetic oligonucleotide
uugaaauuuucucacacuucacagaga

SEQ ID NO: 159979 - RNA, 27 nt, Artificial Sequence
  Description of Artificial Sequence: Synthetic oligonucleotide
ucaggaggauucauuuccuuaaaggaa

SEQ ID NO: 159980 - RNA, 27 nt, Artificial Sequence
  Description of Artificial Sequence: Synthetic oligonucleotide
auaugaugucacuuuuuguauccuuga

SEQ ID NO: 159981 - RNA, 27 nt, Artificial Sequence
  Description of Artificial Sequence: Synthetic oligonucleotide
uaugaugaagauucaaauugcaucuua

SEQ ID NO: 159982 - RNA, 27 nt, Artificial Sequence
  Description of Artificial Sequence: Synthetic oligonucleotide
uuaauagcuagucuucguuuugaacag

SEQ ID NO: 159983 - RNA, 27 nt, Artificial Sequence
  Description of Artificial Sequence: Synthetic oligonucleotide
auuuuuaguagagaugagguuucacca

SEQ ID NO: 159984 - RNA, 27 nt, Artificial Sequence
  Description of Artificial Sequence: Synthetic oligonucleotide
aggcgagauagagcuucucuuucguuc

SEQ ID NO: 159985 - RNA, 27 nt, Artificial Sequence
  Description of Artificial Sequence: Synthetic oligonucleotide
aacuggaccgaaggcgcuuguggagaa

SEQ ID NO: 159986 - RNA, 27 nt, Artificial Sequence
  Description of Artificial Sequence: Synthetic oligonucleotide
gcggcuacaucuuuggaaucuucuccu

SEQ ID NO: 159987 - RNA, 27 nt, Artificial Sequence
  Description of Artificial Sequence: Synthetic oligonucleotide
caagucuccucauugaauccagauugg

SEQ ID NO: 159988 - RNA, 27 nt, Artificial Sequence
  Description of Artificial Sequence: Synthetic oligonucleotide
uccucacuacucucaaaucuguucugg

SEQ ID NO: 159989 - RNA, 27 nt, Artificial Sequence
  Description of Artificial Sequence: Synthetic oligonucleotide
uuuguacucaucugcacagcucuggcu

SEQ ID NO: 159990 - RNA, 27 nt, Artificial Sequence
  Description of Artificial Sequence: Synthetic oligonucleotide
gcccauuaacaacaacaaucugaggug

SEQ ID NO: 159991 - RNA, 27 nt, Artificial Sequence
  Description of Artificial Sequence: Synthetic oligonucleotide
aauaaauuaaaaauaauuaaaauagug

SEQ ID NO: 159992 - RNA, 27 nt, Artificial Sequence
  Description of Artificial Sequence: Synthetic oligonucleotide
cauauuuaaauauuaauaaauuaaaaa

SEQ ID NO: 159993 - RNA, 27 nt, Artificial Sequence
  Description of Artificial Sequence: Synthetic oligonucleotide
gaaacaaaggauauucaaacugcauag

SEQ ID NO: 159994 - RNA, 27 nt, Artificial Sequence
  Description of Artificial Sequence: Synthetic oligonucleotide
caaacacuuagacgccagcagcauggg

SEQ ID NO: 159995 - RNA, 27 nt, Artificial Sequence
  Description of Artificial Sequence: Synthetic oligonucleotide
uuugucacaggugaaaugcacaucuga

SEQ ID NO: 159996 - RNA, 27 nt, Artificial Sequence
  Description of Artificial Sequence: Synthetic oligonucleotide
uaauucagccuggcacagguuuugauc

SEQ ID NO: 159997 - RNA, 27 nt, Artificial Sequence
  Description of Artificial Sequence: Synthetic oligonucleotide
auuguaagaaugacuacccacauucac

SEQ ID NO: 159998 - RNA, 27 nt, Artificial Sequence
  Description of Artificial Sequence: Synthetic oligonucleotide
caauuguaagaaugacuacccacauuc

SEQ ID NO: 159999 - RNA, 27 nt, Artificial Sequence
  Description of Artificial Sequence: Synthetic oligonucleotide
guacacucucugaugcucauuuucaua

SEQ ID NO: 160000 - RNA, 27 nt, Artificial Sequence
  Description of Artificial Sequence: Synthetic oligonucleotide
cugcugaguucuacaugaaaagcaaau

SEQ ID NO: 160001 - RNA, 27 nt, Artificial Sequence
  Description of Artificial Sequence: Synthetic oligonucleotide
uacugaaaauaaauauagaaauacaac

SEQ ID NO: 160002 - RNA, 27 nt, Artificial Sequence
  Description of Artificial Sequence: Synthetic oligonucleotide
uuccauuuaagaaacauuaaucaaaac

SEQ ID NO: 160003 - RNA, 27 nt, Artificial Sequence
  Description of Artificial Sequence: Synthetic oligonucleotide
acaauuuuaggcacuauacacguuguu

SEQ ID NO: 160004 - RNA, 27 nt, Artificial Sequence
  Description of Artificial Sequence: Synthetic oligonucleotide
ccagauguuaguagccaaggauauggu

SEQ ID NO: 160005 - RNA, 27 nt, Artificial Sequence
  Description of Artificial Sequence: Synthetic oligonucleotide
agcucacagucuccagauguuaguagc

SEQ ID NO: 160006 - RNA, 27 nt, Artificial Sequence
  Description of Artificial Sequence: Synthetic oligonucleotide
auuaauaaaaagcacacaacuuauggc

SEQ ID NO: 160007 - RNA, 27 nt, Artificial Sequence
  Description of Artificial Sequence: Synthetic oligonucleotide
aauguaagaagagccaaaaugaugcau

SEQ ID NO: 160008 - RNA, 27 nt, Artificial Sequence
  Description of Artificial Sequence: Synthetic oligonucleotide
acauuuuuacaaauguaagaagagcca

SEQ ID NO: 160009 - RNA, 27 nt, Artificial Sequence
  Description of Artificial Sequence: Synthetic oligonucleotide
aauaugaauuaagaugaccuaaucugu

SEQ ID NO: 160010 - RNA, 27 nt, Artificial Sequence
  Description of Artificial Sequence: Synthetic oligonucleotide
ucaugauuaguucuuucaauuccaucc

SEQ ID NO: 160011 - RNA, 27 nt, Artificial Sequence
  Description of Artificial Sequence: Synthetic oligonucleotide
cccaagagcagaaggaaugagugugca

SEQ ID NO: 160012 - RNA, 27 nt, Artificial Sequence
  Description of Artificial Sequence: Synthetic oligonucleotide
cucaaagcuacugguuaccucuacacc

SEQ ID NO: 160013 - RNA, 27 nt, Artificial Sequence
  Description of Artificial Sequence: Synthetic oligonucleotide
ugaaauauuacguggcaugugguuggg

SEQ ID NO: 160014 - RNA, 27 nt, Artificial Sequence
  Description of Artificial Sequence: Synthetic oligonucleotide
agugaagagaauaacuuguuuccgaag

SEQ ID NO: 160015 - RNA, 27 nt, Artificial Sequence
  Description of Artificial Sequence: Synthetic oligonucleotide
uuucuuagcauuaguuauugggaguga

SEQ ID NO: 160016 - RNA, 27 nt, Artificial Sequence
  Description of Artificial Sequence: Synthetic oligonucleotide
uugauuuucagcauuucuuagcauuag

SEQ ID NO: 160017 - RNA, 27 nt, Artificial Sequence
  Description of Artificial Sequence: Synthetic oligonucleotide
aaaguaaucauauuuagagaaagacag

SEQ ID NO: 160018 - RNA, 27 nt, Artificial Sequence
  Description of Artificial Sequence: Synthetic oligonucleotide
uguagaacaaaaugccugaaauucagc

SEQ ID NO: 160019 - RNA, 27 nt, Artificial Sequence
  Description of Artificial Sequence: Synthetic oligonucleotide
gagagucccgggugagagggaaucgcc

SEQ ID NO: 160020 - RNA, 27 nt, Artificial Sequence
  Description of Artificial Sequence: Synthetic oligonucleotide
cuuuacuuuaaagguucacuuuccuug

SEQ ID NO: 160021 - RNA, 27 nt, Artificial Sequence
  Description of Artificial Sequence: Synthetic oligonucleotide
ccaggcuuccagagcaugcagccuccu

SEQ ID NO: 160022 - RNA, 27 nt, Artificial Sequence
  Description of Artificial Sequence: Synthetic oligonucleotide
cucucuuuuguuuucuguucagagaaa

SEQ ID NO: 160023 - RNA, 27 nt, Artificial Sequence
  Description of Artificial Sequence: Synthetic oligonucleotide
cggcauaacugauuacagccaaguuca

SEQ ID NO: 160024 - RNA, 27 nt, Artificial Sequence
  Description of Artificial Sequence: Synthetic oligonucleotide
uggacuucuuuuaauuuuggcuucuuc

SEQ ID NO: 160025 - RNA, 27 nt, Artificial Sequence
  Description of Artificial Sequence: Synthetic oligonucleotide
uaaccucaccuggacuucuuuuaauuu

SEQ ID NO: 160026 - RNA, 27 nt, Artificial Sequence
  Description of Artificial Sequence: Synthetic oligonucleotide
guccucuucccgauaauccggauucag

SEQ ID NO: 160027 - RNA, 27 nt, Artificial Sequence
  Description of Artificial Sequence: Synthetic oligonucleotide
acaauacuugcuuugaugucacauuaa

SEQ ID NO: 160028 - RNA, 27 nt, Artificial Sequence
  Description of Artificial Sequence: Synthetic oligonucleotide
gagugcuacaauacuugcuuugauguc

SEQ ID NO: 160029 - RNA, 27 nt, Artificial Sequence
  Description of Artificial Sequence: Synthetic oligonucleotide
auuugugguuuuguuuucucucucucu

SEQ ID NO: 160030 - RNA, 27 nt, Artificial Sequence
  Description of Artificial Sequence: Synthetic oligonucleotide
uguaugggcuuaaauacuacagcgagg

SEQ ID NO: 160031 - RNA, 27 nt, Artificial Sequence
  Description of Artificial Sequence: Synthetic oligonucleotide
cuguaugggcuuaaauacuacagcgag

SEQ ID NO: 160032 - RNA, 27 nt, Artificial Sequence
  Description of Artificial Sequence: Synthetic oligonucleotide
ggaagguuucuguaugggcuuaaauac

SEQ ID NO: 160033 - RNA, 27 nt, Artificial Sequence
  Description of Artificial Sequence: Synthetic oligonucleotide
guagguauaccauguuuauuuuaauac

SEQ ID NO: 160034 - RNA, 27 nt, Artificial Sequence
  Description of Artificial Sequence: Synthetic oligonucleotide
uccgaaaacuggccgaucagaacagcc

SEQ ID NO: 160035 - RNA, 27 nt, Artificial Sequence
  Description of Artificial Sequence: Synthetic oligonucleotide
cccuguuccaaaguucaaauuauuugu

SEQ ID NO: 160036 - RNA, 27 nt, Artificial Sequence
  Description of Artificial Sequence: Synthetic oligonucleotide
acuggaaaguuaaauuaaggucgcaau

SEQ ID NO: 160037 - RNA, 27 nt, Artificial Sequence
  Description of Artificial Sequence: Synthetic oligonucleotide
caaaaccaaacuuuagcuuucucagcc

SEQ ID NO: 160038 - RNA, 27 nt, Artificial Sequence
  Description of Artificial Sequence: Synthetic oligonucleotide
uacagugggaaguagcaucuuuacuuu

SEQ ID NO: 160039 - RNA, 27 nt, Artificial Sequence
  Description of Artificial Sequence: Synthetic oligonucleotide
ucauaugguaucagcaauuaagcagua

SEQ ID NO: 160040 - RNA, 27 nt, Artificial Sequence
  Description of Artificial Sequence: Synthetic oligonucleotide
cagcccauguuucauucauaugguauc

SEQ ID NO: 160041 - RNA, 27 nt, Artificial Sequence
  Description of Artificial Sequence: Synthetic oligonucleotide
uaugaaaaaguuggauaagaaaguugg

SEQ ID NO: 160042 - RNA, 27 nt, Artificial Sequence
  Description of Artificial Sequence: Synthetic oligonucleotide
uccggccucaugaugucaugcaaggcu

SEQ ID NO: 160043 - RNA, 27 nt, Artificial Sequence
  Description of Artificial Sequence: Synthetic oligonucleotide
acaaaugcagucauauacaaauucagg

SEQ ID NO: 160044 - RNA, 27 nt, Artificial Sequence
  Description of Artificial Sequence: Synthetic oligonucleotide
gguaguaaacauucuacuaggauucuu

SEQ ID NO: 160045 - RNA, 27 nt, Artificial Sequence
  Description of Artificial Sequence: Synthetic oligonucleotide
uuucaucaaaaaauucuucccuuucug

SEQ ID NO: 160046 - RNA, 27 nt, Artificial Sequence
  Description of Artificial Sequence: Synthetic oligonucleotide
aaauucacacacuggcaugccgauagc

SEQ ID NO: 160047 - RNA, 27 nt, Artificial Sequence
  Description of Artificial Sequence: Synthetic oligonucleotide
acauacauugcucuacuaugaggugaa

SEQ ID NO: 160048 - RNA, 27 nt, Artificial Sequence
  Description of Artificial Sequence: Synthetic oligonucleotide
uauauaugugcuuuggcaauucuggug

SEQ ID NO: 160049 - RNA, 27 nt, Artificial Sequence
  Description of Artificial Sequence: Synthetic oligonucleotide
ggagaaacuauuacccagaucaccacu

SEQ ID NO: 160050 - RNA, 27 nt, Artificial Sequence
  Description of Artificial Sequence: Synthetic oligonucleotide
auuuggagaaacuauuacccagaucac

SEQ ID NO: 160051 - RNA, 27 nt, Artificial Sequence
  Description of Artificial Sequence: Synthetic oligonucleotide
uuucuaggaaguauucaucacauccac

SEQ ID NO: 160052 - RNA, 27 nt, Artificial Sequence
  Description of Artificial Sequence: Synthetic oligonucleotide
cauauaugguguagcuguggaaaugcg

SEQ ID NO: 160053 - RNA, 27 nt, Artificial Sequence
  Description of Artificial Sequence: Synthetic oligonucleotide
cuccauucauauaugguguagcugugg

SEQ ID NO: 160054 - RNA, 27 nt, Artificial Sequence
  Description of Artificial Sequence: Synthetic oligonucleotide
aucuucuucucguguaagaacugcagc

SEQ ID NO: 160055 - RNA, 27 nt, Artificial Sequence
  Description of Artificial Sequence: Synthetic oligonucleotide
ucccuguaaaugaucuucuucucgugu

SEQ ID NO: 160056 - RNA, 27 nt, Artificial Sequence
  Description of Artificial Sequence: Synthetic oligonucleotide
gucccuguaaaugaucuucuucucgug

SEQ ID NO: 160057 - RNA, 27 nt, Artificial Sequence
  Description of Artificial Sequence: Synthetic oligonucleotide
ucaggucccuguaaaugaucuucuucu

SEQ ID NO: 160058 - RNA, 27 nt, Artificial Sequence
  Description of Artificial Sequence: Synthetic oligonucleotide
gaugcagucaaacaccucuuccucugu

SEQ ID NO: 160059 - RNA, 27 nt, Artificial Sequence
  Description of Artificial Sequence: Synthetic oligonucleotide
cgaugcagucaaacaccucuuccucug

SEQ ID NO: 160060 - RNA, 27 nt, Artificial Sequence
  Description of Artificial Sequence: Synthetic oligonucleotide
cccugugaacucgcccucaaaguagcg

SEQ ID NO: 160061 - RNA, 27 nt, Artificial Sequence
  Description of Artificial Sequence: Synthetic oligonucleotide
ggacagaggugccaggagaugcccuca

SEQ ID NO: 160062 - RNA, 27 nt, Artificial Sequence
  Description of Artificial Sequence: Synthetic oligonucleotide
uuaaaaagacaaaccauaucacuccuu

SEQ ID NO: 160063 - RNA, 27 nt, Artificial Sequence
  Description of Artificial Sequence: Synthetic oligonucleotide
cuuaaaaagacaaaccauaucacuccu

SEQ ID NO: 160064 - RNA, 27 nt, Artificial Sequence
  Description of Artificial Sequence: Synthetic oligonucleotide
gacaaccuuuaggaucuuuacugcaac

SEQ ID NO: 160065 - RNA, 27 nt, Artificial Sequence
  Description of Artificial Sequence: Synthetic oligonucleotide
gucgacaaccuuuaggaucuuuacugc

SEQ ID NO: 160066 - RNA, 27 nt, Artificial Sequence
  Description of Artificial Sequence: Synthetic oligonucleotide
acaauugccagguuguccuuugucaug

SEQ ID NO: 160067 - RNA, 27 nt, Artificial Sequence
  Description of Artificial Sequence: Synthetic oligonucleotide
ccucgcaccacugggucacaauugcca

SEQ ID NO: 160068 - RNA, 27 nt, Artificial Sequence
  Description of Artificial Sequence: Synthetic oligonucleotide
auuucaugucucuauggaugauguucu

SEQ ID NO: 160069 - RNA, 27 nt, Artificial Sequence
  Description of Artificial Sequence: Synthetic oligonucleotide
uggagaaauauauuguuggauuucaug

SEQ ID NO: 160070 - RNA, 27 nt, Artificial Sequence
  Description of Artificial Sequence: Synthetic oligonucleotide
agccuucauggagaaauauauuguugg

SEQ ID NO: 160071 - RNA, 27 nt, Artificial Sequence
  Description of Artificial Sequence: Synthetic oligonucleotide
accacuccagcgugacuuuacuguugc

SEQ ID NO: 160072 - RNA, 27 nt, Artificial Sequence
  Description of Artificial Sequence: Synthetic oligonucleotide
ccucucuuccuuuacuuucuucacaca

SEQ ID NO: 160073 - RNA, 27 nt, Artificial Sequence
  Description of Artificial Sequence: Synthetic oligonucleotide
gcccgaugcaaggauggcucggaagcg

SEQ ID NO: 160074 - RNA, 27 nt, Artificial Sequence
  Description of Artificial Sequence: Synthetic oligonucleotide
cacaguaggauauucaaccuccauuuc

SEQ ID NO: 160075 - RNA, 27 nt, Artificial Sequence
  Description of Artificial Sequence: Synthetic oligonucleotide
uuacacaguaggauauucaaccuccau

SEQ ID NO: 160076 - RNA, 27 nt, Artificial Sequence
  Description of Artificial Sequence: Synthetic oligonucleotide
uacacuacaagggaaaacucaaaaucu

SEQ ID NO: 160077 - RNA, 27 nt, Artificial Sequence
  Description of Artificial Sequence: Synthetic oligonucleotide
caaucaacaaagaacaaacaggauaaa

SEQ ID NO: 160078 - RNA, 27 nt, Artificial Sequence
  Description of Artificial Sequence: Synthetic oligonucleotide
uuucaaucaacaaagaacaaacaggau

SEQ ID NO: 160079 - RNA, 27 nt, Artificial Sequence
  Description of Artificial Sequence: Synthetic oligonucleotide
auggaagaaaaagaaggcuguagagaa

SEQ ID NO: 160080 - RNA, 27 nt, Artificial Sequence
  Description of Artificial Sequence: Synthetic oligonucleotide
uagaaggaagauuagcuauggaagaaa

SEQ ID NO: 160081 - RNA, 27 nt, Artificial Sequence
  Description of Artificial Sequence: Synthetic oligonucleotide
augaagcauucaacaggaagauuauuu

SEQ ID NO: 160082 - RNA, 27 nt, Artificial Sequence
  Description of Artificial Sequence: Synthetic oligonucleotide
caugaagcauucaacaggaagauuauu

SEQ ID NO: 160083 - RNA, 27 nt, Artificial Sequence
  Description of Artificial Sequence: Synthetic oligonucleotide
ucaaaguagaauucaagucaugaagca

SEQ ID NO: 160084 - RNA, 27 nt, Artificial Sequence
  Description of Artificial Sequence: Synthetic oligonucleotide
gucuguaguugcuucucucccucuuag

SEQ ID NO: 160085 - RNA, 27 nt, Artificial Sequence
  Description of Artificial Sequence: Synthetic oligonucleotide
guugaccuuggucugguaggagacggc

SEQ ID NO: 160086 - RNA, 27 nt, Artificial Sequence
  Description of Artificial Sequence: Synthetic oligonucleotide
gucgagauagucgggccgauugaucuc

SEQ ID NO: 160087 - RNA, 27 nt, Artificial Sequence
  Description of Artificial Sequence: Synthetic oligonucleotide
guuugggaagguuggauguucguccuc

SEQ ID NO: 160088 - RNA, 27 nt, Artificial Sequence
  Description of Artificial Sequence: Synthetic oligonucleotide
aguucuaagcuuggguuccgacccuaa

SEQ ID NO: 160089 - RNA, 27 nt, Artificial Sequence
  Description of Artificial Sequence: Synthetic oligonucleotide
uuaaaguucuaagcuuggguuccgacc

SEQ ID NO: 160090 - RNA, 27 nt, Artificial Sequence
  Description of Artificial Sequence: Synthetic oligonucleotide
guugcuuaaaguucuaagcuuggguuc

SEQ ID NO: 160091 - RNA, 27 nt, Artificial Sequence
  Description of Artificial Sequence: Synthetic oligonucleotide
gugguggucuuguugcuuaaaguucua

SEQ ID NO: 160092 - RNA, 27 nt, Artificial Sequence
  Description of Artificial Sequence: Synthetic oligonucleotide
acuuuauuucucgccacugaauaguag

SEQ ID NO: 160093 - RNA, 27 nt, Artificial Sequence
  Description of Artificial Sequence: Synthetic oligonucleotide
aacuuuauuucucgccacugaauagua

SEQ ID NO: 160094 - RNA, 27 nt, Artificial Sequence
  Description of Artificial Sequence: Synthetic oligonucleotide
ggaucauuuccuguuaucuguguuugu

SEQ ID NO: 160095 - RNA, 27 nt, Artificial Sequence
  Description of Artificial Sequence: Synthetic oligonucleotide
guuucauuucuucucuuuucuuaaggc

SEQ ID NO: 160096 - RNA, 27 nt, Artificial Sequence
  Description of Artificial Sequence: Synthetic oligonucleotide
ggaggauggaaacacacuccuucaguu

SEQ ID NO: 160097 - RNA, 27 nt, Artificial Sequence
  Description of Artificial Sequence: Synthetic oligonucleotide
ucaaagauuuucagucccgcggugaca

SEQ ID NO: 160098 - RNA, 27 nt, Artificial Sequence
  Description of Artificial Sequence: Synthetic oligonucleotide
ccugaacggcacgcuuauuucugcugu

SEQ ID NO: 160099 - RNA, 27 nt, Artificial Sequence
  Description of Artificial Sequence: Synthetic oligonucleotide
cuucuggacccugaacggcacgcuuau

SEQ ID NO: 160100 - RNA, 27 nt, Artificial Sequence
  Description of Artificial Sequence: Synthetic oligonucleotide
caagcagucuugagugacuguuucuuc

SEQ ID NO: 160101 - RNA, 27 nt, Artificial Sequence
  Description of Artificial Sequence: Synthetic oligonucleotide
ccaaagacauggaccuucuuccucuga

SEQ ID NO: 160102 - RNA, 27 nt, Artificial Sequence
  Description of Artificial Sequence: Synthetic oligonucleotide
guguuucaggcauauuuugaauacauc

SEQ ID NO: 160103 - RNA, 27 nt, Artificial Sequence
  Description of Artificial Sequence: Synthetic oligonucleotide
gagguacagagaaagggaggaaaauag

SEQ ID NO: 160104 - RNA, 27 nt, Artificial Sequence
  Description of Artificial Sequence: Synthetic oligonucleotide
ucuugucuugcucuaucuuucuuuggu

SEQ ID NO: 160105 - RNA, 27 nt, Artificial Sequence
  Description of Artificial Sequence: Synthetic oligonucleotide
uuucuugucuugcucuaucuuucuuug

SEQ ID NO: 160106 - RNA, 27 nt, Artificial Sequence
  Description of Artificial Sequence: Synthetic oligonucleotide
ggaucuuguacaaacaaaugcuuucuc

SEQ ID NO: 160107 - RNA, 27 nt, Artificial Sequence
  Description of Artificial Sequence: Synthetic oligonucleotide
ucugcaaguacguucguuuaacucaag

SEQ ID NO: 160108 - RNA, 27 nt, Artificial Sequence
  Description of Artificial Sequence: Synthetic oligonucleotide
ucuguaucgaucguucuguaucagucu

SEQ ID NO: 160109 - RNA, 27 nt, Artificial Sequence
  Description of Artificial Sequence: Synthetic oligonucleotide
auuuauuuuuauauauauauaauauau

SEQ ID NO: 160110 - RNA, 27 nt, Artificial Sequence
  Description of Artificial Sequence: Synthetic oligonucleotide
auauuuauuuuuauauauauauaauau

SEQ ID NO: 160111 - RNA, 27 nt, Artificial Sequence
  Description of Artificial Sequence: Synthetic oligonucleotide
cacagcagucaaauacauccagugaag

SEQ ID NO: 160112 - RNA, 27 nt, Artificial Sequence
  Description of Artificial Sequence: Synthetic oligonucleotide
gucucucaucuccuccucuucccuguc

SEQ ID NO: 160113 - RNA, 27 nt, Artificial Sequence
  Description of Artificial Sequence: Synthetic oligonucleotide
ccaagugggacaaaaaaaagaucaugc

SEQ ID NO: 160114 - RNA, 14 nt, Artificial Sequence
  Description of Artificial Sequence: Synthetic oligonucleotide
guauuuugaugagg

SEQ ID NO: 160115 - RNA, 12 nt, Artificial Sequence
  Description of Artificial Sequence: Synthetic oligonucleotide
ggcccagaugau

SEQ ID NO: 160116 - RNA, 14 nt, Artificial Sequence
  Description of Artificial Sequence: Synthetic oligonucleotide
gggaagaaaacuau

SEQ ID NO: 160117 - RNA, 15 nt, Artificial Sequence
  Description of Artificial Sequence: Synthetic oligonucleotide
guuuuaauuuauuuc

SEQ ID NO: 160118 - RNA, 12 nt, Artificial Sequence
  Description of Artificial Sequence: Synthetic oligonucleotide
acguagggaaau

SEQ ID NO: 160119 - RNA, 12 nt, Artificial Sequence
  Description of Artificial Sequence: Synthetic oligonucleotide
ccaggguuuacc

SEQ ID NO: 160120 - RNA, 11 nt, Artificial Sequence
  Description of Artificial Sequence: Synthetic oligonucleotide
agcaagguuua

SEQ ID NO: 160121 - RNA, 12 nt, Artificial Sequence
  Description of Artificial Sequence: Synthetic oligonucleotide
uguauuauguug

SEQ ID NO: 160122 - RNA, 15 nt, Artificial Sequence
  Description of Artificial Sequence: Synthetic oligonucleotide
uuuuaaucuuuguga

SEQ ID NO: 160123 - RNA, 14 nt, Artificial Sequence
  Description of Artificial Sequence: Synthetic oligonucleotide
uuaaucuuugugac

SEQ ID NO: 160124 - RNA, 13 nt, Artificial Sequence
  Description of Artificial Sequence: Synthetic oligonucleotide
gcugcuuaugucu

SEQ ID NO: 160125 - RNA, 14 nt, Artificial Sequence
  Description of Artificial Sequence: Synthetic oligonucleotide
aaguguuucagaag

SEQ ID NO: 160126 - RNA, 13 nt, Artificial Sequence
  Description of Artificial Sequence: Synthetic oligonucleotide
gaccaucaauaag

SEQ ID NO: 160127 - RNA, 13 nt, Artificial Sequence
  Description of Artificial Sequence: Synthetic oligonucleotide
ccaucaauaagga

SEQ ID NO: 160128 - RNA, 14 nt, Artificial Sequence
  Description of Artificial Sequence: Synthetic oligonucleotide
ucaauaaggaagaa

SEQ ID NO: 160129 - RNA, 14 nt, Artificial Sequence
  Description of Artificial Sequence: Synthetic oligonucleotide
aauaaggaagaagc

SEQ ID NO: 160130 - RNA, 13 nt, Artificial Sequence
  Description of Artificial Sequence: Synthetic oligonucleotide
aggaagaagcccu

SEQ ID NO: 160131 - RNA, 13 nt, Artificial Sequence
  Description of Artificial Sequence: Synthetic oligonucleotide
gcauaacuaaagg

SEQ ID NO: 160132 - RNA, 14 nt, Artificial Sequence
  Description of Artificial Sequence: Synthetic oligonucleotide
cauaacuaaaggug

SEQ ID NO: 160133 - RNA, 12 nt, Artificial Sequence
  Description of Artificial Sequence: Synthetic oligonucleotide
cuacaucacgcc

SEQ ID NO: 160134 - RNA, 12 nt, Artificial Sequence
  Description of Artificial Sequence: Synthetic oligonucleotide
acuggauuuaag

SEQ ID NO: 160135 - RNA, 12 nt, Artificial Sequence
  Description of Artificial Sequence: Synthetic oligonucleotide
cuggauuuaagc

SEQ ID NO: 160136 - RNA, 13 nt, Artificial Sequence
  Description of Artificial Sequence: Synthetic oligonucleotide
gauuuaagcagag

SEQ ID NO: 160137 - RNA, 13 nt, Artificial Sequence
  Description of Artificial Sequence: Synthetic oligonucleotide
auuuaagcagagu

SEQ ID NO: 160138 - RNA, 13 nt, Artificial Sequence
  Description of Artificial Sequence: Synthetic oligonucleotide
uuaagcagaguuc

SEQ ID NO: 160139 - RNA, 13 nt, Artificial Sequence
  Description of Artificial Sequence: Synthetic oligonucleotide
uaagcagaguuca

SEQ ID NO: 160140 - RNA, 14 nt, Artificial Sequence
  Description of Artificial Sequence: Synthetic oligonucleotide
agcagaguucaaaa

SEQ ID NO: 160141 - RNA, 12 nt, Artificial Sequence
  Description of Artificial Sequence: Synthetic oligonucleotide
cucagggucuga

SEQ ID NO: 160142 - RNA, 13 nt, Artificial Sequence
  Description of Artificial Sequence: Synthetic oligonucleotide
caagcaacuacau

SEQ ID NO: 160143 - RNA, 12 nt, Artificial Sequence
  Description of Artificial Sequence: Synthetic oligonucleotide
aucaauggcagc

SEQ ID NO: 160144 - RNA, 11 nt, Artificial Sequence
  Description of Artificial Sequence: Synthetic oligonucleotide
uuccagcccac

SEQ ID NO: 160145 - RNA, 12 nt, Artificial Sequence
  Description of Artificial Sequence: Synthetic oligonucleotide
cagcugagaaug

SEQ ID NO: 160146 - RNA, 13 nt, Artificial Sequence
  Description of Artificial Sequence: Synthetic oligonucleotide
aacguaucuccua

SEQ ID NO: 160147 - RNA, 14 nt, Artificial Sequence
  Description of Artificial Sequence: Synthetic oligonucleotide
ccuaaaauaauuuc

SEQ ID NO: 160148 - RNA, 13 nt, Artificial Sequence
  Description of Artificial Sequence: Synthetic oligonucleotide
uggaagauucagc

SEQ ID NO: 160149 - RNA, 12 nt, Artificial Sequence
  Description of Artificial Sequence: Synthetic oligonucleotide
uuaaacucuccu

SEQ ID NO: 160150 - RNA, 12 nt, Artificial Sequence
  Description of Artificial Sequence: Synthetic oligonucleotide
cagccuacaguu

SEQ ID NO: 160151 - RNA, 13 nt, Artificial Sequence
  Description of Artificial Sequence: Synthetic oligonucleotide
guuauguucaguc

SEQ ID NO: 160152 - RNA, 13 nt, Artificial Sequence
  Description of Artificial Sequence: Synthetic oligonucleotide
cacauacaaaaug

SEQ ID NO: 160153 - RNA, 9 nt, Artificial Sequence
  Description of Artificial Sequence: Synthetic oligonucleotide
uccuuuugc

SEQ ID NO: 160154 - RNA, 12 nt, Artificial Sequence
  Description of Artificial Sequence: Synthetic oligonucleotide
ugaccugugaag

SEQ ID NO: 160155 - RNA, 12 nt, Artificial Sequence
  Description of Artificial Sequence: Synthetic oligonucleotide
cuaucucacaca

SEQ ID NO: 160156 - RNA, 13 nt, Artificial Sequence
  Description of Artificial Sequence: Synthetic oligonucleotide
uguccucaauugu

SEQ ID NO: 160157 - RNA, 12 nt, Artificial Sequence
  Description of Artificial Sequence: Synthetic oligonucleotide
aaaccguagcug

SEQ ID NO: 160158 - RNA, 12 nt, Artificial Sequence
  Description of Artificial Sequence: Synthetic oligonucleotide
uagcuggcaagc

SEQ ID NO: 160159 - RNA, 14 nt, Artificial Sequence
  Description of Artificial Sequence: Synthetic oligonucleotide
uuguaugguuaaaa

SEQ ID NO: 160160 - RNA, 14 nt, Artificial Sequence
  Description of Artificial Sequence: Synthetic oligonucleotide
ugguuaaaagaugg

SEQ ID NO: 160161 - RNA, 13 nt, Artificial Sequence
  Description of Artificial Sequence: Synthetic oligonucleotide
cagggaauuauac

SEQ ID NO: 160162 - RNA, 12 nt, Artificial Sequence
  Description of Artificial Sequence: Synthetic oligonucleotide
acaaucuugcug

SEQ ID NO: 160163 - RNA, 13 nt, Artificial Sequence
  Description of Artificial Sequence: Synthetic oligonucleotide
ccaauaaugaaga

SEQ ID NO: 160164 - RNA, 13 nt, Artificial Sequence
  Description of Artificial Sequence: Synthetic oligonucleotide
acuuuggauguuc

SEQ ID NO: 160165 - RNA, 12 nt, Artificial Sequence
  Description of Artificial Sequence: Synthetic oligonucleotide
aaugcuuccacu

SEQ ID NO: 160166 - RNA, 11 nt, Artificial Sequence
  Description of Artificial Sequence: Synthetic oligonucleotide
gagaaaguuug

SEQ ID NO: 160167 - RNA, 11 nt, Artificial Sequence
  Description of Artificial Sequence: Synthetic oligonucleotide
aaagaacuacu

SEQ ID NO: 160168 - RNA, 12 nt, Artificial Sequence
  Description of Artificial Sequence: Synthetic oligonucleotide
uuagaaauacgg

SEQ ID NO: 160169 - RNA, 12 nt, Artificial Sequence
  Description of Artificial Sequence: Synthetic oligonucleotide
aacauggguaca

SEQ ID NO: 160170 - RNA, 14 nt, Artificial Sequence
  Description of Artificial Sequence: Synthetic oligonucleotide
aaagacacagaaga

SEQ ID NO: 160171 - RNA, 11 nt, Artificial Sequence
  Description of Artificial Sequence: Synthetic oligonucleotide
uaguagggagg

SEQ ID NO: 160172 - RNA, 12 nt, Artificial Sequence
  Description of Artificial Sequence: Synthetic oligonucleotide
gccuucugcagc

SEQ ID NO: 160173 - RNA, 10 nt, Artificial Sequence
  Description of Artificial Sequence: Synthetic oligonucleotide
ggucugguac

SEQ ID NO: 160174 - RNA, 12 nt, Artificial Sequence
  Description of Artificial Sequence: Synthetic oligonucleotide
cuaguccuuccg

SEQ ID NO: 160175 - RNA, 12 nt, Artificial Sequence
  Description of Artificial Sequence: Synthetic oligonucleotide
ccagugaauauu

SEQ ID NO: 160176 - RNA, 13 nt, Artificial Sequence
  Description of Artificial Sequence: Synthetic oligonucleotide
augaauucaaguu

SEQ ID NO: 160177 - RNA, 12 nt, Artificial Sequence
  Description of Artificial Sequence: Synthetic oligonucleotide
caggacacagau

SEQ ID NO: 160178 - RNA, 12 nt, Artificial Sequence
  Description of Artificial Sequence: Synthetic oligonucleotide
cucaaagcacag

SEQ ID NO: 160179 - RNA, 10 nt, Artificial Sequence
  Description of Artificial Sequence: Synthetic oligonucleotide
accacugcca

SEQ ID NO: 160180 - RNA, 13 nt, Artificial Sequence
  Description of Artificial Sequence: Synthetic oligonucleotide
gaaacuacuagug

SEQ ID NO: 160181 - RNA, 12 nt, Artificial Sequence
  Description of Artificial Sequence: Synthetic oligonucleotide
aagucggacagc

SEQ ID NO: 160182 - RNA, 13 nt, Artificial Sequence
  Description of Artificial Sequence: Synthetic oligonucleotide
gaaagcgaaaaau

SEQ ID NO: 160183 - RNA, 13 nt, Artificial Sequence
  Description of Artificial Sequence: Synthetic oligonucleotide
cccucugauuuag

SEQ ID NO: 160184 - RNA, 12 nt, Artificial Sequence
  Description of Artificial Sequence: Synthetic oligonucleotide
ugagcuauuuaa

SEQ ID NO: 160185 - RNA, 13 nt, Artificial Sequence
  Description of Artificial Sequence: Synthetic oligonucleotide
aaaaggugaaaaa

SEQ ID NO: 160186 - RNA, 14 nt, Artificial Sequence
  Description of Artificial Sequence: Synthetic oligonucleotide
gaaaaagcacuauu

SEQ ID NO: 160187 - RNA, 12 nt, Artificial Sequence
  Description of Artificial Sequence: Synthetic oligonucleotide
ggcugaaaagaa

SEQ ID NO: 160188 - RNA, 12 nt, Artificial Sequence
  Description of Artificial Sequence: Synthetic oligonucleotide
uaaacccuuaua

SEQ ID NO: 160189 - RNA, 13 nt, Artificial Sequence
  Description of Artificial Sequence: Synthetic oligonucleotide
cauacuauuagcc

SEQ ID NO: 160190 - RNA, 12 nt, Artificial Sequence
  Description of Artificial Sequence: Synthetic oligonucleotide
gacagaagcauu

SEQ ID NO: 160191 - RNA, 14 nt, Artificial Sequence
  Description of Artificial Sequence: Synthetic oligonucleotide
agagcaaauaagau

SEQ ID NO: 160192 - RNA, 14 nt, Artificial Sequence
  Description of Artificial Sequence: Synthetic oligonucleotide
ccaacauuuuucuc

SEQ ID NO: 160193 - RNA, 15 nt, Artificial Sequence
  Description of Artificial Sequence: Synthetic oligonucleotide
uuaaguaugagaaaa

SEQ ID NO: 160194 - RNA, 14 nt, Artificial Sequence
  Description of Artificial Sequence: Synthetic oligonucleotide
caggaauaaagaug

SEQ ID NO: 160195 - RNA, 13 nt, Artificial Sequence
  Description of Artificial Sequence: Synthetic oligonucleotide
aauuugaaugacc

SEQ ID NO: 160196 - RNA, 14 nt, Artificial Sequence
  Description of Artificial Sequence: Synthetic oligonucleotide
auguauaaagauag

SEQ ID NO: 160197 - RNA, 12 nt, Artificial Sequence
  Description of Artificial Sequence: Synthetic oligonucleotide
ggcuguaacuau

SEQ ID NO: 160198 - RNA, 11 nt, Artificial Sequence
  Description of Artificial Sequence: Synthetic oligonucleotide
ucugugaagug

SEQ ID NO: 160199 - RNA, 14 nt, Artificial Sequence
  Description of Artificial Sequence: Synthetic oligonucleotide
ccuuuaaggaaaug

SEQ ID NO: 160200 - RNA, 13 nt, Artificial Sequence
  Description of Artificial Sequence: Synthetic oligonucleotide
aaggauacaaaaa

SEQ ID NO: 160201 - RNA, 12 nt, Artificial Sequence
  Description of Artificial Sequence: Synthetic oligonucleotide
agaugcaauuug

SEQ ID NO: 160202 - RNA, 12 nt, Artificial Sequence
  Description of Artificial Sequence: Synthetic oligonucleotide
guucaaaacgaa

SEQ ID NO: 160203 - RNA, 11 nt, Artificial Sequence
  Description of Artificial Sequence: Synthetic oligonucleotide
gugaaaccuca

SEQ ID NO: 160204 - RNA, 13 nt, Artificial Sequence
  Description of Artificial Sequence: Synthetic oligonucleotide
acgaaagagaagc

SEQ ID NO: 160205 - RNA, 12 nt, Artificial Sequence
  Description of Artificial Sequence: Synthetic oligonucleotide
cuccacaagcgc

SEQ ID NO: 160206 - RNA, 14 nt, Artificial Sequence
  Description of Artificial Sequence: Synthetic oligonucleotide
gagaagauuccaaa

SEQ ID NO: 160207 - RNA, 13 nt, Artificial Sequence
  Description of Artificial Sequence: Synthetic oligonucleotide
aaucuggauucaa

SEQ ID NO: 160208 - RNA, 13 nt, Artificial Sequence
  Description of Artificial Sequence: Synthetic oligonucleotide
agaacagauuuga

SEQ ID NO: 160209 - RNA, 11 nt, Artificial Sequence
  Description of Artificial Sequence: Synthetic oligonucleotide
ccagagcugug

SEQ ID NO: 160210 - RNA, 12 nt, Artificial Sequence
  Description of Artificial Sequence: Synthetic oligonucleotide
ccucagauuguu

SEQ ID NO: 160211 - RNA, 12 nt, Artificial Sequence
  Description of Artificial Sequence: Synthetic oligonucleotide
cuauuuuaauua

SEQ ID NO: 160212 - RNA, 13 nt, Artificial Sequence
  Description of Artificial Sequence: Synthetic oligonucleotide
uuuaauuuauuaa

SEQ ID NO: 160213 - RNA, 12 nt, Artificial Sequence
  Description of Artificial Sequence: Synthetic oligonucleotide
augcaguuugaa

SEQ ID NO: 160214 - RNA, 11 nt, Artificial Sequence
  Description of Artificial Sequence: Synthetic oligonucleotide
caugcugcugg

SEQ ID NO: 160215 - RNA, 13 nt, Artificial Sequence
  Description of Artificial Sequence: Synthetic oligonucleotide
agaugugcauuuc

SEQ ID NO: 160216 - RNA, 12 nt, Artificial Sequence
  Description of Artificial Sequence: Synthetic oligonucleotide
ucaaaaccugug

SEQ ID NO: 160217 - RNA, 11 nt, Artificial Sequence
  Description of Artificial Sequence: Synthetic oligonucleotide
gaaugugggua

SEQ ID NO: 160218 - RNA, 10 nt, Artificial Sequence
  Description of Artificial Sequence: Synthetic oligonucleotide
auguggguag

SEQ ID NO: 160219 - RNA, 13 nt, Artificial Sequence
  Description of Artificial Sequence: Synthetic oligonucleotide
ugaaaaugagcau

SEQ ID NO: 160220 - RNA, 13 nt, Artificial Sequence
  Description of Artificial Sequence: Synthetic oligonucleotide
uugcuuuucaugu

SEQ ID NO: 160221 - RNA, 12 nt, Artificial Sequence
  Description of Artificial Sequence: Synthetic oligonucleotide
uguauuucuaua

SEQ ID NO: 160222 - RNA, 13 nt, Artificial Sequence
  Description of Artificial Sequence: Synthetic oligonucleotide
uuugauuaauguu

SEQ ID NO: 160223 - RNA, 12 nt, Artificial Sequence
  Description of Artificial Sequence: Synthetic oligonucleotide
caacguguauag

SEQ ID NO: 160224 - RNA, 12 nt, Artificial Sequence
  Description of Artificial Sequence: Synthetic oligonucleotide
cauauccuuggc

SEQ ID NO: 160225 - RNA, 13 nt, Artificial Sequence
  Description of Artificial Sequence: Synthetic oligonucleotide
uacuaacaucugg

SEQ ID NO: 160226 - RNA, 11 nt, Artificial Sequence
  Description of Artificial Sequence: Synthetic oligonucleotide
cauaaguugug

SEQ ID NO: 160227 - RNA, 12 nt, Artificial Sequence
  Description of Artificial Sequence: Synthetic oligonucleotide
gcaucauuuugg

SEQ ID NO: 160228 - RNA, 10 nt, Artificial Sequence
  Description of Artificial Sequence: Synthetic oligonucleotide
gcucuucuua

SEQ ID NO: 160229 - RNA, 10 nt, Artificial Sequence
  Description of Artificial Sequence: Synthetic oligonucleotide
agauuagguc

SEQ ID NO: 160230 - RNA, 12 nt, Artificial Sequence
  Description of Artificial Sequence: Synthetic oligonucleotide
auggaauugaaa

SEQ ID NO: 160231 - RNA, 13 nt, Artificial Sequence
  Description of Artificial Sequence: Synthetic oligonucleotide
cacacucauuccu

SEQ ID NO: 160232 - RNA, 12 nt, Artificial Sequence
  Description of Artificial Sequence: Synthetic oligonucleotide
uguagagguaac

SEQ ID NO: 160233 - RNA, 11 nt, Artificial Sequence
  Description of Artificial Sequence: Synthetic oligonucleotide
caaccacaugc

SEQ ID NO: 160234 - RNA, 12 nt, Artificial Sequence
  Description of Artificial Sequence: Synthetic oligonucleotide
ucggaaacaagu

SEQ ID NO: 160235 - RNA, 11 nt, Artificial Sequence
  Description of Artificial Sequence: Synthetic oligonucleotide
acucccaauaa

SEQ ID NO: 160236 - RNA, 13 nt, Artificial Sequence
  Description of Artificial Sequence: Synthetic oligonucleotide
aaugcuaagaaau

SEQ ID NO: 160237 - RNA, 11 nt, Artificial Sequence
  Description of Artificial Sequence: Synthetic oligonucleotide
gucuuucucua

SEQ ID NO: 160238 - RNA, 11 nt, Artificial Sequence
  Description of Artificial Sequence: Synthetic oligonucleotide
ugaauuucagg

SEQ ID NO: 160239 - RNA, 13 nt, Artificial Sequence
  Description of Artificial Sequence: Synthetic oligonucleotide
cgauucccucuca

SEQ ID NO: 160240 - RNA, 11 nt, Artificial Sequence
  Description of Artificial Sequence: Synthetic oligonucleotide
aggaaagugaa

SEQ ID NO: 160241 - RNA, 12 nt, Artificial Sequence
  Description of Artificial Sequence: Synthetic oligonucleotide
gaggcugcaugc

SEQ ID NO: 160242 - RNA, 11 nt, Artificial Sequence
  Description of Artificial Sequence: Synthetic oligonucleotide
ucucugaacag

SEQ ID NO: 160243 - RNA, 12 nt, Artificial Sequence
  Description of Artificial Sequence: Synthetic oligonucleotide
aacuuggcugua

SEQ ID NO: 160244 - RNA, 12 nt, Artificial Sequence
  Description of Artificial Sequence: Synthetic oligonucleotide
agaagccaaaau

SEQ ID NO: 160245 - RNA, 14 nt, Artificial Sequence
  Description of Artificial Sequence: Synthetic oligonucleotide
auuaaaagaagucc

SEQ ID NO: 160246 - RNA, 14 nt, Artificial Sequence
  Description of Artificial Sequence: Synthetic oligonucleotide
gaauccggauuauc

SEQ ID NO: 160247 - RNA, 12 nt, Artificial Sequence
  Description of Artificial Sequence: Synthetic oligonucleotide
aaugugacauca

SEQ ID NO: 160248 - RNA, 13 nt, Artificial Sequence
  Description of Artificial Sequence: Synthetic oligonucleotide
caucaaagcaagu

SEQ ID NO: 160249 - RNA, 11 nt, Artificial Sequence
  Description of Artificial Sequence: Synthetic oligonucleotide
agagagagaaa

SEQ ID NO: 160250 - RNA, 13 nt, Artificial Sequence
  Description of Artificial Sequence: Synthetic oligonucleotide
ucgcuguaguauu

SEQ ID NO: 160251 - RNA, 14 nt, Artificial Sequence
  Description of Artificial Sequence: Synthetic oligonucleotide
cgcuguaguauuua

SEQ ID NO: 160252 - RNA, 13 nt, Artificial Sequence
  Description of Artificial Sequence: Synthetic oligonucleotide
auuuaagcccaua

SEQ ID NO: 160253 - RNA, 15 nt, Artificial Sequence
  Description of Artificial Sequence: Synthetic oligonucleotide
auuaaaauaaacaug

SEQ ID NO: 160254 - RNA, 12 nt, Artificial Sequence
  Description of Artificial Sequence: Synthetic oligonucleotide
cuguucugaucg

SEQ ID NO: 160255 - RNA, 16 nt, Artificial Sequence
  Description of Artificial Sequence: Synthetic oligonucleotide
aaauaauuugaacuuu

SEQ ID NO: 160256 - RNA, 12 nt, Artificial Sequence
  Description of Artificial Sequence: Synthetic oligonucleotide
ugcgaccuuaau

SEQ ID NO: 160257 - RNA, 11 nt, Artificial Sequence
  Description of Artificial Sequence: Synthetic oligonucleotide
cugagaaagcu

SEQ ID NO: 160258 - RNA, 13 nt, Artificial Sequence
  Description of Artificial Sequence: Synthetic oligonucleotide
aguaaagaugcua

SEQ ID NO: 160259 - RNA, 12 nt, Artificial Sequence
  Description of Artificial Sequence: Synthetic oligonucleotide
cugcuuaauugc

SEQ ID NO: 160260 - RNA, 14 nt, Artificial Sequence
  Description of Artificial Sequence: Synthetic oligonucleotide
uaccauaugaauga

SEQ ID NO: 160261 - RNA, 12 nt, Artificial Sequence
  Description of Artificial Sequence: Synthetic oligonucleotide
aacuuucuuauc

SEQ ID NO: 160262 - RNA, 13 nt, Artificial Sequence
  Description of Artificial Sequence: Synthetic oligonucleotide
ccuugcaugacau

SEQ ID NO: 160263 - RNA, 14 nt, Artificial Sequence
  Description of Artificial Sequence: Synthetic oligonucleotide
ugaauuuguauaug

SEQ ID NO: 160264 - RNA, 12 nt, Artificial Sequence
  Description of Artificial Sequence: Synthetic oligonucleotide
gaauccuaguag

SEQ ID NO: 160265 - RNA, 10 nt, Artificial Sequence
  Description of Artificial Sequence: Synthetic oligonucleotide
gaaagggaag

SEQ ID NO: 160266 - RNA, 11 nt, Artificial Sequence
  Description of Artificial Sequence: Synthetic oligonucleotide
uaucggcaugc

SEQ ID NO: 160267 - RNA, 12 nt, Artificial Sequence
  Description of Artificial Sequence: Synthetic oligonucleotide
caccucauagua

SEQ ID NO: 160268 - RNA, 11 nt, Artificial Sequence
  Description of Artificial Sequence: Synthetic oligonucleotide
ccagaauugcc

SEQ ID NO: 160269 - RNA, 11 nt, Artificial Sequence
  Description of Artificial Sequence: Synthetic oligonucleotide
uggugaucugg

SEQ ID NO: 160270 - RNA, 12 nt, Artificial Sequence
  Description of Artificial Sequence: Synthetic oligonucleotide
gaucuggguaau

SEQ ID NO: 160271 - RNA, 12 nt, Artificial Sequence
  Description of Artificial Sequence: Synthetic oligonucleotide
ggaugugaugaa

SEQ ID NO: 160272 - RNA, 12 nt, Artificial Sequence
  Description of Artificial Sequence: Synthetic oligonucleotide
cauuuccacagc

SEQ ID NO: 160273 - RNA, 11 nt, Artificial Sequence
  Description of Artificial Sequence: Synthetic oligonucleotide
acagcuacacc

SEQ ID NO: 160274 - RNA, 12 nt, Artificial Sequence
  Description of Artificial Sequence: Synthetic oligonucleotide
ugcaguucuuac

SEQ ID NO: 160275 - RNA, 12 nt, Artificial Sequence
  Description of Artificial Sequence: Synthetic oligonucleotide
acgagaagaaga

SEQ ID NO: 160276 - RNA, 12 nt, Artificial Sequence
  Description of Artificial Sequence: Synthetic oligonucleotide
cgagaagaagau

SEQ ID NO: 160277 - RNA, 15 nt, Artificial Sequence
  Description of Artificial Sequence: Synthetic oligonucleotide
aagaagaucauuuac

SEQ ID NO: 160278 - RNA, 11 nt, Artificial Sequence
  Description of Artificial Sequence: Synthetic oligonucleotide
agaggaagagg

SEQ ID NO: 160279 - RNA, 12 nt, Artificial Sequence
  Description of Artificial Sequence: Synthetic oligonucleotide
gaggaagaggug

SEQ ID NO: 160280 - RNA, 13 nt, Artificial Sequence
  Description of Artificial Sequence: Synthetic oligonucleotide
cuacuuugagggc

SEQ ID NO: 160281 - RNA, 12 nt, Artificial Sequence
  Description of Artificial Sequence: Synthetic oligonucleotide
agggcaucuccu

SEQ ID NO: 160282 - RNA, 10 nt, Artificial Sequence
  Description of Artificial Sequence: Synthetic oligonucleotide
ggagugauau

SEQ ID NO: 160283 - RNA, 11 nt, Artificial Sequence
  Description of Artificial Sequence: Synthetic oligonucleotide
gagugauaugg

SEQ ID NO: 160284 - RNA, 12 nt, Artificial Sequence
  Description of Artificial Sequence: Synthetic oligonucleotide
ugcaguaaagau

SEQ ID NO: 160285 - RNA, 13 nt, Artificial Sequence
  Description of Artificial Sequence: Synthetic oligonucleotide
aguaaagauccua

SEQ ID NO: 160286 - RNA, 12 nt, Artificial Sequence
  Description of Artificial Sequence: Synthetic oligonucleotide
ugacaaaggaca

SEQ ID NO: 160287 - RNA, 13 nt, Artificial Sequence
  Description of Artificial Sequence: Synthetic oligonucleotide
gcaauugugaccc

SEQ ID NO: 160288 - RNA, 12 nt, Artificial Sequence
  Description of Artificial Sequence: Synthetic oligonucleotide
aacaucauccau

SEQ ID NO: 160289 - RNA, 12 nt, Artificial Sequence
  Description of Artificial Sequence: Synthetic oligonucleotide
ugaaauccaaca

SEQ ID NO: 160290 - RNA, 15 nt, Artificial Sequence
  Description of Artificial Sequence: Synthetic oligonucleotide
aacaauauauuucuc

SEQ ID NO: 160291 - RNA, 14 nt, Artificial Sequence
  Description of Artificial Sequence: Synthetic oligonucleotide
aacaguaaagucac

SEQ ID NO: 160292 - RNA, 14 nt, Artificial Sequence
  Description of Artificial Sequence: Synthetic oligonucleotide
ugugaagaaaguaa

SEQ ID NO: 160293 - RNA, 13 nt, Artificial Sequence
  Description of Artificial Sequence: Synthetic oligonucleotide
cuuccgagccauc

SEQ ID NO: 160294 - RNA, 12 nt, Artificial Sequence
  Description of Artificial Sequence: Synthetic oligonucleotide
aauggagguuga

SEQ ID NO: 160295 - RNA, 12 nt, Artificial Sequence
  Description of Artificial Sequence: Synthetic oligonucleotide
ggagguugaaua

SEQ ID NO: 160296 - RNA, 13 nt, Artificial Sequence
  Description of Artificial Sequence: Synthetic oligonucleotide
auuuugaguuuuc

SEQ ID NO: 160297 - RNA, 12 nt, Artificial Sequence
  Description of Artificial Sequence: Synthetic oligonucleotide
uauccuguuugu

SEQ ID NO: 160298 - RNA, 11 nt, Artificial Sequence
  Description of Artificial Sequence: Synthetic oligonucleotide
ccuguuuguuc

SEQ ID NO: 160299 - RNA, 10 nt, Artificial Sequence
  Description of Artificial Sequence: Synthetic oligonucleotide
cucuacagcc

SEQ ID NO: 160300 - RNA, 12 nt, Artificial Sequence
  Description of Artificial Sequence: Synthetic oligonucleotide
ucuuccauagcu

SEQ ID NO: 160301 - RNA, 12 nt, Artificial Sequence
  Description of Artificial Sequence: Synthetic oligonucleotide
auaaucuuccug

SEQ ID NO: 160302 - RNA, 12 nt, Artificial Sequence
  Description of Artificial Sequence: Synthetic oligonucleotide
uaaucuuccugu

SEQ ID NO: 160303 - RNA, 12 nt, Artificial Sequence
  Description of Artificial Sequence: Synthetic oligonucleotide
cuucaugacuug

SEQ ID NO: 160304 - RNA, 12 nt, Artificial Sequence
  Description of Artificial Sequence: Synthetic oligonucleotide
aagagggagaga

SEQ ID NO: 160305 - RNA, 12 nt, Artificial Sequence
  Description of Artificial Sequence: Synthetic oligonucleotide
cgucuccuacca

SEQ ID NO: 160306 - RNA, 12 nt, Artificial Sequence
  Description of Artificial Sequence: Synthetic oligonucleotide
gaucaaucggcc

SEQ ID NO: 160307 - RNA, 12 nt, Artificial Sequence
  Description of Artificial Sequence: Synthetic oligonucleotide
ggacgaacaucc

SEQ ID NO: 160308 - RNA, 11 nt, Artificial Sequence
  Description of Artificial Sequence: Synthetic oligonucleotide
agggucggaac

SEQ ID NO: 160309 - RNA, 10 nt, Artificial Sequence
  Description of Artificial Sequence: Synthetic oligonucleotide
ucggaaccca

SEQ ID NO: 160310 - RNA, 11 nt, Artificial Sequence
  Description of Artificial Sequence: Synthetic oligonucleotide
acccaagcuua

SEQ ID NO: 160311 - RNA, 14 nt, Artificial Sequence
  Description of Artificial Sequence: Synthetic oligonucleotide
gaacuuuaagcaac

SEQ ID NO: 160312 - RNA, 11 nt, Artificial Sequence
  Description of Artificial Sequence: Synthetic oligonucleotide
acuauucagug

SEQ ID NO: 160313 - RNA, 11 nt, Artificial Sequence
  Description of Artificial Sequence: Synthetic oligonucleotide
cuauucagugg

SEQ ID NO: 160314 - RNA, 13 nt, Artificial Sequence
  Description of Artificial Sequence: Synthetic oligonucleotide
aaacacagauaac

SEQ ID NO: 160315 - RNA, 12 nt, Artificial Sequence
  Description of Artificial Sequence: Synthetic oligonucleotide
cuuaagaaaaga

SEQ ID NO: 160316 - RNA, 12 nt, Artificial Sequence
  Description of Artificial Sequence: Synthetic oligonucleotide
cugaaggagugu

SEQ ID NO: 160317 - RNA, 10 nt, Artificial Sequence
  Description of Artificial Sequence: Synthetic oligonucleotide
ucaccgcggg

SEQ ID NO: 160318 - RNA, 14 nt, Artificial Sequence
  Description of Artificial Sequence: Synthetic oligonucleotide
agcagaaauaagcg

SEQ ID NO: 160319 - RNA, 12 nt, Artificial Sequence
  Description of Artificial Sequence: Synthetic oligonucleotide
aagcgugccguu

SEQ ID NO: 160320 - RNA, 12 nt, Artificial Sequence
  Description of Artificial Sequence: Synthetic oligonucleotide
agaaacagucac

SEQ ID NO: 160321 - RNA, 12 nt, Artificial Sequence
  Description of Artificial Sequence: Synthetic oligonucleotide
agaggaagaagg

SEQ ID NO: 160322 - RNA, 14 nt, Artificial Sequence
  Description of Artificial Sequence: Synthetic oligonucleotide
uguauucaaaauau

SEQ ID NO: 160323 - RNA, 13 nt, Artificial Sequence
  Description of Artificial Sequence: Synthetic oligonucleotide
auuuuccucccuu

SEQ ID NO: 160324 - RNA, 13 nt, Artificial Sequence
  Description of Artificial Sequence: Synthetic oligonucleotide
caaagaaagauag

SEQ ID NO: 160325 - RNA, 12 nt, Artificial Sequence
  Description of Artificial Sequence: Synthetic oligonucleotide
aagaaagauaga

SEQ ID NO: 160326 - RNA, 13 nt, Artificial Sequence
  Description of Artificial Sequence: Synthetic oligonucleotide
gaaagcauuuguu

SEQ ID NO: 160327 - RNA, 13 nt, Artificial Sequence
  Description of Artificial Sequence: Synthetic oligonucleotide
ugaguuaaacgaa

SEQ ID NO: 160328 - RNA, 12 nt, Artificial Sequence
  Description of Artificial Sequence: Synthetic oligonucleotide
acugauacagaa

SEQ ID NO: 160329 - RNA, 12 nt, Artificial Sequence
  Description of Artificial Sequence: Synthetic oligonucleotide
auauuauauaua

SEQ ID NO: 160330 - RNA, 12 nt, Artificial Sequence
  Description of Artificial Sequence: Synthetic oligonucleotide
auuauauauaua

SEQ ID NO: 160331 - RNA, 12 nt, Artificial Sequence
  Description of Artificial Sequence: Synthetic oligonucleotide
ucacuggaugua

SEQ ID NO: 160332 - RNA, 12 nt, Artificial Sequence
  Description of Artificial Sequence: Synthetic oligonucleotide
cagggaagagga

SEQ ID NO: 160333 - RNA, 15 nt, Artificial Sequence
  Description of Artificial Sequence: Synthetic oligonucleotide
augaucuuuuuuuug

SEQ ID NO: 160334 - RNA, 11 nt, Artificial Sequence
  Description of Artificial Sequence: Synthetic oligonucleotide
aguucacggcc

SEQ ID NO: 160335 - RNA, 13 nt, Artificial Sequence
  Description of Artificial Sequence: Synthetic oligonucleotide
caccaucacacca

SEQ ID NO: 160336 - RNA, 11 nt, Artificial Sequence
  Description of Artificial Sequence: Synthetic oligonucleotide
ccugcggguuu

SEQ ID NO: 160337 - RNA, 10 nt, Artificial Sequence
  Description of Artificial Sequence: Synthetic oligonucleotide
auccaguuug

SEQ ID NO: 160338 - RNA, 13 nt, Artificial Sequence
  Description of Artificial Sequence: Synthetic oligonucleotide
guuaaggacuucu

SEQ ID NO: 160339 - RNA, 13 nt, Artificial Sequence
  Description of Artificial Sequence: Synthetic oligonucleotide
cagugggacagag

SEQ ID NO: 160340 - RNA, 14 nt, Artificial Sequence
  Description of Artificial Sequence: Synthetic oligonucleotide
aauuuguuauugug

SEQ ID NO: 160341 - RNA, 13 nt, Artificial Sequence
  Description of Artificial Sequence: Synthetic oligonucleotide
uucaaaugcauuu

SEQ ID NO: 160342 - RNA, 10 nt, Artificial Sequence
  Description of Artificial Sequence: Synthetic oligonucleotide
caggaaagcc

SEQ ID NO: 160343 - RNA, 11 nt, Artificial Sequence
  Description of Artificial Sequence: Synthetic oligonucleotide
aggaaagcccu

SEQ ID NO: 160344 - RNA, 12 nt, Artificial Sequence
  Description of Artificial Sequence: Synthetic oligonucleotide
cccagcauggcc

SEQ ID NO: 160345 - RNA, 11 nt, Artificial Sequence
  Description of Artificial Sequence: Synthetic oligonucleotide
cuucucccuga

SEQ ID NO: 160346 - RNA, 12 nt, Artificial Sequence
  Description of Artificial Sequence: Synthetic oligonucleotide
gaagaagcccuu

SEQ ID NO: 160347 - RNA, 12 nt, Artificial Sequence
  Description of Artificial Sequence: Synthetic oligonucleotide
agaagcccuuca

SEQ ID NO: 160348 - RNA, 11 nt, Artificial Sequence
  Description of Artificial Sequence: Synthetic oligonucleotide
gcccuucagcg

SEQ ID NO: 160349 - RNA, 11 nt, Artificial Sequence
  Description of Artificial Sequence: Synthetic oligonucleotide
ccuucagcggc

SEQ ID NO: 160350 - RNA, 12 nt, Artificial Sequence
  Description of Artificial Sequence: Synthetic oligonucleotide
ucagcggccagu

SEQ ID NO: 160351 - RNA, 12 nt, Artificial Sequence
  Description of Artificial Sequence: Synthetic oligonucleotide
ugaaaagcuccg

SEQ ID NO: 160352 - RNA, 11 nt, Artificial Sequence
  Description of Artificial Sequence: Synthetic oligonucleotide
aaaagcuccgg

SEQ ID NO: 160353 - RNA, 13 nt, Artificial Sequence
  Description of Artificial Sequence: Synthetic oligonucleotide
agucaacagucug

SEQ ID NO: 160354 - RNA, 13 nt, Artificial Sequence
  Description of Artificial Sequence: Synthetic oligonucleotide
cagaguucaaaag

SEQ ID NO: 160355 - RNA, 13 nt, Artificial Sequence
  Description of Artificial Sequence: Synthetic oligonucleotide
agaguucaaaagc

SEQ ID NO: 160356 - RNA, 12 nt, Artificial Sequence
  Description of Artificial Sequence: Synthetic oligonucleotide
uucaaaagcccu

SEQ ID NO: 160357 - RNA, 12 nt, Artificial Sequence
  Description of Artificial Sequence: Synthetic oligonucleotide
ucaaaagcccuu

SEQ ID NO: 160358 - RNA, 12 nt, Artificial Sequence
  Description of Artificial Sequence: Synthetic oligonucleotide
aaaagcccuuca

SEQ ID NO: 160359 - RNA, 12 nt, Artificial Sequence
  Description of Artificial Sequence: Synthetic oligonucleotide
aaagcccuucag

SEQ ID NO: 160360 - RNA, 13 nt, Artificial Sequence
  Description of Artificial Sequence: Synthetic oligonucleotide
gugaagccgcucg

SEQ ID NO: 160361 - RNA, 12 nt, Artificial Sequence
  Description of Artificial Sequence: Synthetic oligonucleotide
cacgccagucaa

SEQ ID NO: 160362 - RNA, 13 nt, Artificial Sequence
  Description of Artificial Sequence: Synthetic oligonucleotide
uucuuggugcgug

SEQ ID NO: 160363 - RNA, 14 nt, Artificial Sequence
  Description of Artificial Sequence: Synthetic oligonucleotide
auuggauucaucag

SEQ ID NO: 160364 - RNA, 13 nt, Artificial Sequence
  Description of Artificial Sequence: Synthetic oligonucleotide
uggaauaccuaag

SEQ ID NO: 160365 - RNA, 12 nt, Artificial Sequence
  Description of Artificial Sequence: Synthetic oligonucleotide
auuugaggcuca

SEQ ID NO: 160366 - RNA, 11 nt, Artificial Sequence
  Description of Artificial Sequence: Synthetic oligonucleotide
ucuacaauugg

SEQ ID NO: 160367 - RNA, 12 nt, Artificial Sequence
  Description of Artificial Sequence: Synthetic oligonucleotide
uaguuaggagcc

SEQ ID NO: 160368 - RNA, 13 nt, Artificial Sequence
  Description of Artificial Sequence: Synthetic oligonucleotide
agucaauauccac

SEQ ID NO: 160369 - RNA, 13 nt, Artificial Sequence
  Description of Artificial Sequence: Synthetic oligonucleotide
auguucagucaca

SEQ ID NO: 160370 - RNA, 12 nt, Artificial Sequence
  Description of Artificial Sequence: Synthetic oligonucleotide
acacacacauac

SEQ ID NO: 160371 - RNA, 12 nt, Artificial Sequence
  Description of Artificial Sequence: Synthetic oligonucleotide
uuccuuuugcuu

SEQ ID NO: 160372 - RNA, 16 nt, Artificial Sequence
  Description of Artificial Sequence: Synthetic oligonucleotide
uuuuaaaguaauuuuu

SEQ ID NO: 160373 - RNA, 13 nt, Artificial Sequence
  Description of Artificial Sequence: Synthetic oligonucleotide
caacagucaaugg

SEQ ID NO: 160374 - RNA, 13 nt, Artificial Sequence
  Description of Artificial Sequence: Synthetic oligonucleotide
ucgacaaaccaau

SEQ ID NO: 160375 - RNA, 12 nt, Artificial Sequence
  Description of Artificial Sequence: Synthetic oligonucleotide
acugcuaccacu

SEQ ID NO: 160376 - RNA, 13 nt, Artificial Sequence
  Description of Artificial Sequence: Synthetic oligonucleotide
gcaagcggucuua

SEQ ID NO: 160377 - RNA, 13 nt, Artificial Sequence
  Description of Artificial Sequence: Synthetic oligonucleotide
ggucuuaccggcu

SEQ ID NO: 160378 - RNA, 11 nt, Artificial Sequence
  Description of Artificial Sequence: Synthetic oligonucleotide
gauggguuacc

SEQ ID NO: 160379 - RNA, 11 nt, Artificial Sequence
  Description of Artificial Sequence: Synthetic oligonucleotide
guuaccugcga

SEQ ID NO: 160380 - RNA, 12 nt, Artificial Sequence
  Description of Artificial Sequence: Synthetic oligonucleotide
aaucuugcugag

SEQ ID NO: 160381 - RNA, 13 nt, Artificial Sequence
  Description of Artificial Sequence: Synthetic oligonucleotide
agcauaaaacagu

SEQ ID NO: 160382 - RNA, 12 nt, Artificial Sequence
  Description of Artificial Sequence: Synthetic oligonucleotide
guccuuuauccu

SEQ ID NO: 160383 - RNA, 12 nt, Artificial Sequence
  Description of Artificial Sequence: Synthetic oligonucleotide
caacgcaaguug

SEQ ID NO: 160384 - RNA, 13 nt, Artificial Sequence
  Description of Artificial Sequence: Synthetic oligonucleotide
aaacugaaaccau

SEQ ID NO: 160385 - RNA, 14 nt, Artificial Sequence
  Description of Artificial Sequence: Synthetic oligonucleotide
acuuuguuaaauau

SEQ ID NO: 160386 - RNA, 14 nt, Artificial Sequence
  Description of Artificial Sequence: Synthetic oligonucleotide
guauauuaaaaguu

SEQ ID NO: 160387 - RNA, 13 nt, Artificial Sequence
  Description of Artificial Sequence: Synthetic oligonucleotide
guuuugacuuaac

SEQ ID NO: 160388 - RNA, 13 nt, Artificial Sequence
  Description of Artificial Sequence: Synthetic oligonucleotide
gcaaacucagcac

SEQ ID NO: 160389 - RNA, 11 nt, Artificial Sequence
  Description of Artificial Sequence: Synthetic oligonucleotide
ugcugaccuca

SEQ ID NO: 160390 - RNA, 14 nt, Artificial Sequence
  Description of Artificial Sequence: Synthetic oligonucleotide
uuuauucagaucgc

SEQ ID NO: 160391 - RNA, 13 nt, Artificial Sequence
  Description of Artificial Sequence: Synthetic oligonucleotide
aggguucugggau

SEQ ID NO: 160392 - RNA, 15 nt, Artificial Sequence
  Description of Artificial Sequence: Synthetic oligonucleotide
auauuggaaauuaug

SEQ ID NO: 160393 - RNA, 13 nt, Artificial Sequence
  Description of Artificial Sequence: Synthetic oligonucleotide
auggaagcacuag

SEQ ID NO: 160394 - RNA, 13 nt, Artificial Sequence
  Description of Artificial Sequence: Synthetic oligonucleotide
guuuuuaugugga

SEQ ID NO: 160395 - RNA, 12 nt, Artificial Sequence
  Description of Artificial Sequence: Synthetic oligonucleotide
ggaauugguaga

SEQ ID NO: 160396 - RNA, 13 nt, Artificial Sequence
  Description of Artificial Sequence: Synthetic oligonucleotide
uuagacuuggaga

SEQ ID NO: 160397 - RNA, 13 nt, Artificial Sequence
  Description of Artificial Sequence: Synthetic oligonucleotide
uuacaguauucca

SEQ ID NO: 160398 - RNA, 15 nt, Artificial Sequence
  Description of Artificial Sequence: Synthetic oligonucleotide
ccacugaugaauuaa

SEQ ID NO: 160399 - RNA, 12 nt, Artificial Sequence
  Description of Artificial Sequence: Synthetic oligonucleotide
ccacaucaucac

SEQ ID NO: 160400 - RNA, 13 nt, Artificial Sequence
  Description of Artificial Sequence: Synthetic oligonucleotide
cucaccaaacaga

SEQ ID NO: 160401 - RNA, 12 nt, Artificial Sequence
  Description of Artificial Sequence: Synthetic oligonucleotide
ggaacaugaugg

SEQ ID NO: 160402 - RNA, 12 nt, Artificial Sequence
  Description of Artificial Sequence: Synthetic oligonucleotide
cauguagacugc

SEQ ID NO: 160403 - RNA, 13 nt, Artificial Sequence
  Description of Artificial Sequence: Synthetic oligonucleotide
ggaucuauuuaug

SEQ ID NO: 160404 - RNA, 12 nt, Artificial Sequence
  Description of Artificial Sequence: Synthetic oligonucleotide
gcacuauuauca

SEQ ID NO: 160405 - RNA, 11 nt, Artificial Sequence
  Description of Artificial Sequence: Synthetic oligonucleotide
aucaguucugc

SEQ ID NO: 160406 - RNA, 13 nt, Artificial Sequence
  Description of Artificial Sequence: Synthetic oligonucleotide
agauuaaaccuac

SEQ ID NO: 160407 - RNA, 13 nt, Artificial Sequence
  Description of Artificial Sequence: Synthetic oligonucleotide
auaaaauccuucu

SEQ ID NO: 160408 - RNA, 12 nt, Artificial Sequence
  Description of Artificial Sequence: Synthetic oligonucleotide
aaugcuguagac

SEQ ID NO: 160409 - RNA, 13 nt, Artificial Sequence
  Description of Artificial Sequence: Synthetic oligonucleotide
uugauaggaauag

SEQ ID NO: 160410 - RNA, 11 nt, Artificial Sequence
  Description of Artificial Sequence: Synthetic oligonucleotide
aauggcccuga

SEQ ID NO: 160411 - RNA, 11 nt, Artificial Sequence
  Description of Artificial Sequence: Synthetic oligonucleotide
uuccucaagca

SEQ ID NO: 160412 - RNA, 10 nt, Artificial Sequence
  Description of Artificial Sequence: Synthetic oligonucleotide
guucagccca

SEQ ID NO: 160413 - RNA, 11 nt, Artificial Sequence
  Description of Artificial Sequence: Synthetic oligonucleotide
gcugcugaacc

SEQ ID NO: 160414 - RNA, 12 nt, Artificial Sequence
  Description of Artificial Sequence: Synthetic oligonucleotide
aaguucucuuca

SEQ ID NO: 160415 - RNA, 11 nt, Artificial Sequence
  Description of Artificial Sequence: Synthetic oligonucleotide
ccagccuagag

SEQ ID NO: 160416 - RNA, 13 nt, Artificial Sequence
  Description of Artificial Sequence: Synthetic oligonucleotide
cucugugaagugu

SEQ ID NO: 160417 - RNA, 14 nt, Artificial Sequence
  Description of Artificial Sequence: Synthetic oligonucleotide
ugagaaaauuucaa

SEQ ID NO: 160418 - RNA, 11 nt, Artificial Sequence
  Description of Artificial Sequence: Synthetic oligonucleotide
aauccuccuga

SEQ ID NO: 160419 - RNA, 12 nt, Artificial Sequence
  Description of Artificial Sequence: Synthetic oligonucleotide
gugacaucauau

SEQ ID NO: 160420 - RNA, 13 nt, Artificial Sequence
  Description of Artificial Sequence: Synthetic oligonucleotide
aaucuucaucaua

SEQ ID NO: 160421 - RNA, 13 nt, Artificial Sequence
  Description of Artificial Sequence: Synthetic oligonucleotide
gacuagcuauuaa

SEQ ID NO: 160422 - RNA, 14 nt, Artificial Sequence
  Description of Artificial Sequence: Synthetic oligonucleotide
ucucuacuaaaaau

SEQ ID NO: 160423 - RNA, 12 nt, Artificial Sequence
  Description of Artificial Sequence: Synthetic oligonucleotide
ucuaucucgccu

SEQ ID NO: 160424 - RNA, 13 nt, Artificial Sequence
  Description of Artificial Sequence: Synthetic oligonucleotide
cuucgguccaguu

SEQ ID NO: 160425 - RNA, 11 nt, Artificial Sequence
  Description of Artificial Sequence: Synthetic oligonucleotide
gauguagccgc

SEQ ID NO: 160426 - RNA, 12 nt, Artificial Sequence
  Description of Artificial Sequence: Synthetic oligonucleotide
ugaggagacuug

SEQ ID NO: 160427 - RNA, 12 nt, Artificial Sequence
  Description of Artificial Sequence: Synthetic oligonucleotide
gaguagugagga

SEQ ID NO: 160428 - RNA, 14 nt, Artificial Sequence
  Description of Artificial Sequence: Synthetic oligonucleotide
cagaugaguacaaa

SEQ ID NO: 160429 - RNA, 13 nt, Artificial Sequence
  Description of Artificial Sequence: Synthetic oligonucleotide
guuguuaaugggc

SEQ ID NO: 160430 - RNA, 13 nt, Artificial Sequence
  Description of Artificial Sequence: Synthetic oligonucleotide
uuuuuaauuuauu

SEQ ID NO: 160431 - RNA, 12 nt, Artificial Sequence
  Description of Artificial Sequence: Synthetic oligonucleotide
uauuuaaauaug

SEQ ID NO: 160432 - RNA, 13 nt, Artificial Sequence
  Description of Artificial Sequence: Synthetic oligonucleotide
uauccuuuguuuc

SEQ ID NO: 160433 - RNA, 14 nt, Artificial Sequence
  Description of Artificial Sequence: Synthetic oligonucleotide
cgucuaaguguuug

SEQ ID NO: 160434 - RNA, 12 nt, Artificial Sequence
  Description of Artificial Sequence: Synthetic oligonucleotide
accugugacaaa

SEQ ID NO: 160435 - RNA, 13 nt, Artificial Sequence
  Description of Artificial Sequence: Synthetic oligonucleotide
ccaggcugaauua

SEQ ID NO: 160436 - RNA, 14 nt, Artificial Sequence
  Description of Artificial Sequence: Synthetic oligonucleotide
gucauucuuacaau

SEQ ID NO: 160437 - RNA, 15 nt, Artificial Sequence
  Description of Artificial Sequence: Synthetic oligonucleotide
ucauucuuacaauug

SEQ ID NO: 160438 - RNA, 12 nt, Artificial Sequence
  Description of Artificial Sequence: Synthetic oligonucleotide
cagagaguguac

SEQ ID NO: 160439 - RNA, 12 nt, Artificial Sequence
  Description of Artificial Sequence: Synthetic oligonucleotide
agaacucagcag

SEQ ID NO: 160440 - RNA, 13 nt, Artificial Sequence
  Description of Artificial Sequence: Synthetic oligonucleotide
uuuauuuucagua

SEQ ID NO: 160441 - RNA, 12 nt, Artificial Sequence
  Description of Artificial Sequence: Synthetic oligonucleotide
ucuuaaauggaa

SEQ ID NO: 160442 - RNA, 13 nt, Artificial Sequence
  Description of Artificial Sequence: Synthetic oligonucleotide
ugccuaaaauugu

SEQ ID NO: 160443 - RNA, 12 nt, Artificial Sequence
  Description of Artificial Sequence: Synthetic oligonucleotide
agacugugagcu

SEQ ID NO: 160444 - RNA, 14 nt, Artificial Sequence
  Description of Artificial Sequence: Synthetic oligonucleotide
ugcuuuuuauuaau

SEQ ID NO: 160445 - RNA, 13 nt, Artificial Sequence
  Description of Artificial Sequence: Synthetic oligonucleotide
cucuucuuacauu

SEQ ID NO: 160446 - RNA, 15 nt, Artificial Sequence
  Description of Artificial Sequence: Synthetic oligonucleotide
cauuuguaaaaaugu

SEQ ID NO: 160447 - RNA, 15 nt, Artificial Sequence
  Description of Artificial Sequence: Synthetic oligonucleotide
aucuuaauucauauu

SEQ ID NO: 160448 - RNA, 13 nt, Artificial Sequence
  Description of Artificial Sequence: Synthetic oligonucleotide
gaacuaaucauga

SEQ ID NO: 160449 - RNA, 12 nt, Artificial Sequence
  Description of Artificial Sequence: Synthetic oligonucleotide
ucugcucuuggg

SEQ ID NO: 160450 - RNA, 13 nt, Artificial Sequence
  Description of Artificial Sequence: Synthetic oligonucleotide
caguagcuuugag

SEQ ID NO: 160451 - RNA, 14 nt, Artificial Sequence
  Description of Artificial Sequence: Synthetic oligonucleotide
cacguaauauuuca

SEQ ID NO: 160452 - RNA, 13 nt, Artificial Sequence
  Description of Artificial Sequence: Synthetic oligonucleotide
uauucucuucacu

SEQ ID NO: 160453 - RNA, 14 nt, Artificial Sequence
  Description of Artificial Sequence: Synthetic oligonucleotide
cuaaugcuaagaaa

SEQ ID NO: 160454 - RNA, 12 nt, Artificial Sequence
  Description of Artificial Sequence: Synthetic oligonucleotide
gcugaaaaucaa

SEQ ID NO: 160455 - RNA, 14 nt, Artificial Sequence
  Description of Artificial Sequence: Synthetic oligonucleotide
aauaugauuacuuu

SEQ ID NO: 160456 - RNA, 14 nt, Artificial Sequence
  Description of Artificial Sequence: Synthetic oligonucleotide
cauuuuguucuaca

SEQ ID NO: 160457 - RNA, 12 nt, Artificial Sequence
  Description of Artificial Sequence: Synthetic oligonucleotide
cccgggacucuc

SEQ ID NO: 160458 - RNA, 14 nt, Artificial Sequence
  Description of Artificial Sequence: Synthetic oligonucleotide
ccuuuaaaguaaag

SEQ ID NO: 160459 - RNA, 13 nt, Artificial Sequence
  Description of Artificial Sequence: Synthetic oligonucleotide
ucuggaagccugg

SEQ ID NO: 160460 - RNA, 14 nt, Artificial Sequence
  Description of Artificial Sequence: Synthetic oligonucleotide
aaaacaaaagagag

SEQ ID NO: 160461 - RNA, 13 nt, Artificial Sequence
  Description of Artificial Sequence: Synthetic oligonucleotide
aucaguuaugccg

SEQ ID NO: 160462 - RNA, 13 nt, Artificial Sequence
  Description of Artificial Sequence: Synthetic oligonucleotide
uaaaagaagucca

SEQ ID NO: 160463 - RNA, 11 nt, Artificial Sequence
  Description of Artificial Sequence: Synthetic oligonucleotide
aggugagguua

SEQ ID NO: 160464 - RNA, 11 nt, Artificial Sequence
  Description of Artificial Sequence: Synthetic oligonucleotide
gggaagaggac

SEQ ID NO: 160465 - RNA, 13 nt, Artificial Sequence
  Description of Artificial Sequence: Synthetic oligonucleotide
aagcaaguauugu

SEQ ID NO: 160466 - RNA, 12 nt, Artificial Sequence
  Description of Artificial Sequence: Synthetic oligonucleotide
auuguagcacuc

SEQ ID NO: 160467 - RNA, 14 nt, Artificial Sequence
  Description of Artificial Sequence: Synthetic oligonucleotide
acaaaaccacaaau

SEQ ID NO: 160468 - RNA, 12 nt, Artificial Sequence
  Description of Artificial Sequence: Synthetic oligonucleotide
uaagcccauaca

SEQ ID NO: 160469 - RNA, 11 nt, Artificial Sequence
  Description of Artificial Sequence: Synthetic oligonucleotide
agcccauacag

SEQ ID NO: 160470 - RNA, 12 nt, Artificial Sequence
  Description of Artificial Sequence: Synthetic oligonucleotide
cagaaaccuucc

SEQ ID NO: 160471 - RNA, 10 nt, Artificial Sequence
  Description of Artificial Sequence: Synthetic oligonucleotide
guauaccuac

SEQ ID NO: 160472 - RNA, 13 nt, Artificial Sequence
  Description of Artificial Sequence: Synthetic oligonucleotide
gccaguuuucgga

SEQ ID NO: 160473 - RNA, 9 nt, Artificial Sequence
  Description of Artificial Sequence: Synthetic oligonucleotide
ggaacaggg

SEQ ID NO: 160474 - RNA, 13 nt, Artificial Sequence
  Description of Artificial Sequence: Synthetic oligonucleotide
uuaacuuuccagu

SEQ ID NO: 160475 - RNA, 14 nt, Artificial Sequence
  Description of Artificial Sequence: Synthetic oligonucleotide
aaaguuugguuuug

SEQ ID NO: 160476 - RNA, 12 nt, Artificial Sequence
  Description of Artificial Sequence: Synthetic oligonucleotide
cuucccacugua

SEQ ID NO: 160477 - RNA, 13 nt, Artificial Sequence
  Description of Artificial Sequence: Synthetic oligonucleotide
ugauaccauauga

SEQ ID NO: 160478 - RNA, 11 nt, Artificial Sequence
  Description of Artificial Sequence: Synthetic oligonucleotide
aacaugggcug

SEQ ID NO: 160479 - RNA, 13 nt, Artificial Sequence
  Description of Artificial Sequence: Synthetic oligonucleotide
caacuuuuucaua

SEQ ID NO: 160480 - RNA, 12 nt, Artificial Sequence
  Description of Artificial Sequence: Synthetic oligonucleotide
caugaggccgga

SEQ ID NO: 160481 - RNA, 11 nt, Artificial Sequence
  Description of Artificial Sequence: Synthetic oligonucleotide
acugcauuugu

SEQ ID NO: 160482 - RNA, 13 nt, Artificial Sequence
  Description of Artificial Sequence: Synthetic oligonucleotide
aauguuuacuacc

SEQ ID NO: 160483 - RNA, 15 nt, Artificial Sequence
  Description of Artificial Sequence: Synthetic oligonucleotide
aauuuuuugaugaaa

SEQ ID NO: 160484 - RNA, 14 nt, Artificial Sequence
  Description of Artificial Sequence: Synthetic oligonucleotide
cagugugugaauuu

SEQ ID NO: 160485 - RNA, 13 nt, Artificial Sequence
  Description of Artificial Sequence: Synthetic oligonucleotide
gagcaauguaugu

SEQ ID NO: 160486 - RNA, 14 nt, Artificial Sequence
  Description of Artificial Sequence: Synthetic oligonucleotide
aaagcacauauaua

SEQ ID NO: 160487 - RNA, 14 nt, Artificial Sequence
  Description of Artificial Sequence: Synthetic oligonucleotide
guaauaguuucucc

SEQ ID NO: 160488 - RNA, 13 nt, Artificial Sequence
  Description of Artificial Sequence: Synthetic oligonucleotide
aguuucuccaaau

SEQ ID NO: 160489 - RNA, 13 nt, Artificial Sequence
  Description of Artificial Sequence: Synthetic oligonucleotide
uacuuccuagaaa

SEQ ID NO: 160490 - RNA, 13 nt, Artificial Sequence
  Description of Artificial Sequence: Synthetic oligonucleotide
uacaccauauaug

SEQ ID NO: 160491 - RNA, 14 nt, Artificial Sequence
  Description of Artificial Sequence: Synthetic oligonucleotide
auauaugaauggag

SEQ ID NO: 160492 - RNA, 13 nt, Artificial Sequence
  Description of Artificial Sequence: Synthetic oligonucleotide
acgagaagaagau

SEQ ID NO: 160493 - RNA, 13 nt, Artificial Sequence
  Description of Artificial Sequence: Synthetic oligonucleotide
ucauuuacaggga

SEQ ID NO: 160494 - RNA, 13 nt, Artificial Sequence
  Description of Artificial Sequence: Synthetic oligonucleotide
cauuuacagggac

SEQ ID NO: 160495 - RNA, 10 nt, Artificial Sequence
  Description of Artificial Sequence: Synthetic oligonucleotide
agggaccuga

SEQ ID NO: 160496 - RNA, 14 nt, Artificial Sequence
  Description of Artificial Sequence: Synthetic oligonucleotide
uguuugacugcauc

SEQ ID NO: 160497 - RNA, 13 nt, Artificial Sequence
  Description of Artificial Sequence: Synthetic oligonucleotide
uuugacugcaucg

SEQ ID NO: 160498 - RNA, 12 nt, Artificial Sequence
  Description of Artificial Sequence: Synthetic oligonucleotide
gaguucacaggg

SEQ ID NO: 160499 - RNA, 13 nt, Artificial Sequence
  Description of Artificial Sequence: Synthetic oligonucleotide
ggcaccucugucc

SEQ ID NO: 160500 - RNA, 15 nt, Artificial Sequence
  Description of Artificial Sequence: Synthetic oligonucleotide
gguuugucuuuuuaa

SEQ ID NO: 160501 - RNA, 14 nt, Artificial Sequence
  Description of Artificial Sequence: Synthetic oligonucleotide
uuugucuuuuuaag

SEQ ID NO: 160502 - RNA, 13 nt, Artificial Sequence
  Description of Artificial Sequence: Synthetic oligonucleotide
ccuaaagguuguc

SEQ ID NO: 160503 - RNA, 12 nt, Artificial Sequence
  Description of Artificial Sequence: Synthetic oligonucleotide
aagguugucgac

SEQ ID NO: 160504 - RNA, 13 nt, Artificial Sequence
  Description of Artificial Sequence: Synthetic oligonucleotide
accuggcaauugu

SEQ ID NO: 160505 - RNA, 12 nt, Artificial Sequence
  Description of Artificial Sequence: Synthetic oligonucleotide
aguggugcgagg

SEQ ID NO: 160506 - RNA, 13 nt, Artificial Sequence
  Description of Artificial Sequence: Synthetic oligonucleotide
agagacaugaaau

SEQ ID NO: 160507 - RNA, 13 nt, Artificial Sequence
  Description of Artificial Sequence: Synthetic oligonucleotide
auauauuucucca

SEQ ID NO: 160508 - RNA, 10 nt, Artificial Sequence
  Description of Artificial Sequence: Synthetic oligonucleotide
caugaaggcu

SEQ ID NO: 160509 - RNA, 11 nt, Artificial Sequence
  Description of Artificial Sequence: Synthetic oligonucleotide
gcuggaguggu

SEQ ID NO: 160510 - RNA, 11 nt, Artificial Sequence
  Description of Artificial Sequence: Synthetic oligonucleotide
aggaagagagg

SEQ ID NO: 160511 - RNA, 12 nt, Artificial Sequence
  Description of Artificial Sequence: Synthetic oligonucleotide
cuugcaucgggc

SEQ ID NO: 160512 - RNA, 13 nt, Artificial Sequence
  Description of Artificial Sequence: Synthetic oligonucleotide
auauccuacugug

SEQ ID NO: 160513 - RNA, 13 nt, Artificial Sequence
  Description of Artificial Sequence: Synthetic oligonucleotide
uccuacuguguaa

SEQ ID NO: 160514 - RNA, 12 nt, Artificial Sequence
  Description of Artificial Sequence: Synthetic oligonucleotide
ccuuguagugua

SEQ ID NO: 160515 - RNA, 13 nt, Artificial Sequence
  Description of Artificial Sequence: Synthetic oligonucleotide
ucuuuguugauug

SEQ ID NO: 160516 - RNA, 14 nt, Artificial Sequence
  Description of Artificial Sequence: Synthetic oligonucleotide
uuuguugauugaaa

SEQ ID NO: 160517 - RNA, 15 nt, Artificial Sequence
  Description of Artificial Sequence: Synthetic oligonucleotide
uucuuuuucuuccau

SEQ ID NO: 160518 - RNA, 13 nt, Artificial Sequence
  Description of Artificial Sequence: Synthetic oligonucleotide
aaucuuccuucua

SEQ ID NO: 160519 - RNA, 13 nt, Artificial Sequence
  Description of Artificial Sequence: Synthetic oligonucleotide
uugaaugcuucau

SEQ ID NO: 160520 - RNA, 13 nt, Artificial Sequence
  Description of Artificial Sequence: Synthetic oligonucleotide
ugaaugcuucaug

SEQ ID NO: 160521 - RNA, 13 nt, Artificial Sequence
  Description of Artificial Sequence: Synthetic oligonucleotide
aauucuacuuuga

SEQ ID NO: 160522 - RNA, 13 nt, Artificial Sequence
  Description of Artificial Sequence: Synthetic oligonucleotide
agcaacuacagac

SEQ ID NO: 160523 - RNA, 13 nt, Artificial Sequence
  Description of Artificial Sequence: Synthetic oligonucleotide
gaccaaggucaac

SEQ ID NO: 160524 - RNA, 13 nt, Artificial Sequence
  Description of Artificial Sequence: Synthetic oligonucleotide
cgacuaucucgac

SEQ ID NO: 160525 - RNA, 13 nt, Artificial Sequence
  Description of Artificial Sequence: Synthetic oligonucleotide
aaccuucccaaac

SEQ ID NO: 160526 - RNA, 14 nt, Artificial Sequence
  Description of Artificial Sequence: Synthetic oligonucleotide
ccaagcuuagaacu

SEQ ID NO: 160527 - RNA, 15 nt, Artificial Sequence
  Description of Artificial Sequence: Synthetic oligonucleotide
agcuuagaacuuuaa

SEQ ID NO: 160528 - RNA, 11 nt, Artificial Sequence
  Description of Artificial Sequence: Synthetic oligonucleotide
aagaccaccac

SEQ ID NO: 160529 - RNA, 14 nt, Artificial Sequence
  Description of Artificial Sequence: Synthetic oligonucleotide
gcgagaaauaaagu

SEQ ID NO: 160530 - RNA, 14 nt, Artificial Sequence
  Description of Artificial Sequence: Synthetic oligonucleotide
cgagaaauaaaguu

SEQ ID NO: 160531 - RNA, 12 nt, Artificial Sequence
  Description of Artificial Sequence: Synthetic oligonucleotide
aggaaaugaucc

SEQ ID NO: 160532 - RNA, 13 nt, Artificial Sequence
  Description of Artificial Sequence: Synthetic oligonucleotide
gaagaaaugaaac

SEQ ID NO: 160533 - RNA, 13 nt, Artificial Sequence
  Description of Artificial Sequence: Synthetic oligonucleotide
guuuccauccucc

SEQ ID NO: 160534 - RNA, 15 nt, Artificial Sequence
  Description of Artificial Sequence: Synthetic oligonucleotide
acugaaaaucuuuga

SEQ ID NO: 160535 - RNA, 11 nt, Artificial Sequence
  Description of Artificial Sequence: Synthetic oligonucleotide
ugccguucagg

SEQ ID NO: 160536 - RNA, 13 nt, Artificial Sequence
  Description of Artificial Sequence: Synthetic oligonucleotide
caggguccagaag

SEQ ID NO: 160537 - RNA, 13 nt, Artificial Sequence
  Description of Artificial Sequence: Synthetic oligonucleotide
ucaagacugcuug

SEQ ID NO: 160538 - RNA, 13 nt, Artificial Sequence
  Description of Artificial Sequence: Synthetic oligonucleotide
uccaugucuuugg

SEQ ID NO: 160539 - RNA, 11 nt, Artificial Sequence
  Description of Artificial Sequence: Synthetic oligonucleotide
gccugaaacac

SEQ ID NO: 160540 - RNA, 12 nt, Artificial Sequence
  Description of Artificial Sequence: Synthetic oligonucleotide
ucucuguaccuc

SEQ ID NO: 160541 - RNA, 12 nt, Artificial Sequence
  Description of Artificial Sequence: Synthetic oligonucleotide
agcaagacaaga

SEQ ID NO: 160542 - RNA, 13 nt, Artificial Sequence
  Description of Artificial Sequence: Synthetic oligonucleotide
gcaagacaagaaa

SEQ ID NO: 160543 - RNA, 12 nt, Artificial Sequence
  Description of Artificial Sequence: Synthetic oligonucleotide
uguacaagaucc

SEQ ID NO: 160544 - RNA, 12 nt, Artificial Sequence
  Description of Artificial Sequence: Synthetic oligonucleotide
cguacuugcaga

SEQ ID NO: 160545 - RNA, 13 nt, Artificial Sequence
  Description of Artificial Sequence: Synthetic oligonucleotide
cgaucgauacaga

SEQ ID NO: 160546 - RNA, 13 nt, Artificial Sequence
  Description of Artificial Sequence: Synthetic oligonucleotide
uauaaaaauaaau

SEQ ID NO: 160547 - RNA, 13 nt, Artificial Sequence
  Description of Artificial Sequence: Synthetic oligonucleotide
uaaaaauaaauau

SEQ ID NO: 160548 - RNA, 13 nt, Artificial Sequence
  Description of Artificial Sequence: Synthetic oligonucleotide
uuugacugcugug

SEQ ID NO: 160549 - RNA, 13 nt, Artificial Sequence
  Description of Artificial Sequence: Synthetic oligonucleotide
ggagaugagagac

SEQ ID NO: 160550 - RNA, 10 nt, Artificial Sequence
  Description of Artificial Sequence: Synthetic oligonucleotide
ucccacuugg

SEQ ID NO: 160551 - RNA, 10 nt, Artificial Sequence
  Description of Artificial Sequence: Synthetic oligonucleotide
guucacggcc

SEQ ID NO: 160552 - RNA, 12 nt, Artificial Sequence
  Description of Artificial Sequence: Synthetic oligonucleotide
accaucacacca

SEQ ID NO: 160553 - RNA, 10 nt, Artificial Sequence
  Description of Artificial Sequence: Synthetic oligonucleotide
cugcggguuu

SEQ ID NO: 160554 - RNA, 9 nt, Artificial Sequence
  Description of Artificial Sequence: Synthetic oligonucleotide
uccaguuug

SEQ ID NO: 160555 - RNA, 12 nt, Artificial Sequence
  Description of Artificial Sequence: Synthetic oligonucleotide
uuaaggacuucu

SEQ ID NO: 160556 - RNA, 12 nt, Artificial Sequence
  Description of Artificial Sequence: Synthetic oligonucleotide
agugggacagag

SEQ ID NO: 160557 - RNA, 13 nt, Artificial Sequence
  Description of Artificial Sequence: Synthetic oligonucleotide
auuuguuauugug

SEQ ID NO: 160558 - RNA, 12 nt, Artificial Sequence
  Description of Artificial Sequence: Synthetic oligonucleotide
ucaaaugcauuu

SEQ ID NO: 160559 - RNA, 9 nt, Artificial Sequence
  Description of Artificial Sequence: Synthetic oligonucleotide
aggaaagcc

SEQ ID NO: 160560 - RNA, 10 nt, Artificial Sequence
  Description of Artificial Sequence: Synthetic oligonucleotide
ggaaagcccu

SEQ ID NO: 160561 - RNA, 11 nt, Artificial Sequence
  Description of Artificial Sequence: Synthetic oligonucleotide
ccagcauggcc

SEQ ID NO: 160562 - RNA, 10 nt, Artificial Sequence
  Description of Artificial Sequence: Synthetic oligonucleotide
uucucccuga

SEQ ID NO: 160563 - RNA, 11 nt, Artificial Sequence
  Description of Artificial Sequence: Synthetic oligonucleotide
aagaagcccuu

SEQ ID NO: 160564 - RNA, 11 nt, Artificial Sequence
  Description of Artificial Sequence: Synthetic oligonucleotide
gaagcccuuca

SEQ ID NO: 160565 - RNA, 10 nt, Artificial Sequence
  Description of Artificial Sequence: Synthetic oligonucleotide
cccuucagcg

SEQ ID NO: 160566 - RNA, 10 nt, Artificial Sequence
  Description of Artificial Sequence: Synthetic oligonucleotide
cuucagcggc

SEQ ID NO: 160567 - RNA, 11 nt, Artificial Sequence
  Description of Artificial Sequence: Synthetic oligonucleotide
cagcggccagu

SEQ ID NO: 160568 - RNA, 11 nt, Artificial Sequence
  Description of Artificial Sequence: Synthetic oligonucleotide
gaaaagcuccg

SEQ ID NO: 160569 - RNA, 10 nt, Artificial Sequence
  Description of Artificial Sequence: Synthetic oligonucleotide
aaagcuccgg

SEQ ID NO: 160570 - RNA, 12 nt, Artificial Sequence
  Description of Artificial Sequence: Synthetic oligonucleotide
gucaacagucug

SEQ ID NO: 160571 - RNA, 12 nt, Artificial Sequence
  Description of Artificial Sequence: Synthetic oligonucleotide
agaguucaaaag

SEQ ID NO: 160572 - RNA, 12 nt, Artificial Sequence
  Description of Artificial Sequence: Synthetic oligonucleotide
gaguucaaaagc

SEQ ID NO: 160573 - RNA, 11 nt, Artificial Sequence
  Description of Artificial Sequence: Synthetic oligonucleotide
ucaaaagcccu

SEQ ID NO: 160574 - RNA, 11 nt, Artificial Sequence
  Description of Artificial Sequence: Synthetic oligonucleotide
caaaagcccuu

SEQ ID NO: 160575 - RNA, 11 nt, Artificial Sequence
  Description of Artificial Sequence: Synthetic oligonucleotide
aaagcccuuca

SEQ ID NO: 160576 - RNA, 11 nt, Artificial Sequence
  Description of Artificial Sequence: Synthetic oligonucleotide
aagcccuucag

SEQ ID NO: 160577 - RNA, 12 nt, Artificial Sequence
  Description of Artificial Sequence: Synthetic oligonucleotide
ugaagccgcucg

SEQ ID NO: 160578 - RNA, 11 nt, Artificial Sequence
  Description of Artificial Sequence: Synthetic oligonucleotide
acgccagucaa

SEQ ID NO: 160579 - RNA, 12 nt, Artificial Sequence
  Description of Artificial Sequence: Synthetic oligonucleotide
ucuuggugcgug

SEQ ID NO: 160580 - RNA, 13 nt, Artificial Sequence
  Description of Artificial Sequence: Synthetic oligonucleotide
uuggauucaucag

SEQ ID NO: 160581 - RNA, 12 nt, Artificial Sequence
  Description of Artificial Sequence: Synthetic oligonucleotide
ggaauaccuaag

SEQ ID NO: 160582 - RNA, 11 nt, Artificial Sequence
  Description of Artificial Sequence: Synthetic oligonucleotide
uuugaggcuca

SEQ ID NO: 160583 - RNA, 10 nt, Artificial Sequence
  Description of Artificial Sequence: Synthetic oligonucleotide
cuacaauugg

SEQ ID NO: 160584 - RNA, 11 nt, Artificial Sequence
  Description of Artificial Sequence: Synthetic oligonucleotide
aguuaggagcc

SEQ ID NO: 160585 - RNA, 12 nt, Artificial Sequence
  Description of Artificial Sequence: Synthetic oligonucleotide
gucaauauccac

SEQ ID NO: 160586 - RNA, 12 nt, Artificial Sequence
  Description of Artificial Sequence: Synthetic oligonucleotide
uguucagucaca

SEQ ID NO: 160587 - RNA, 11 nt, Artificial Sequence
  Description of Artificial Sequence: Synthetic oligonucleotide
cacacacauac

SEQ ID NO: 160588 - RNA, 11 nt, Artificial Sequence
  Description of Artificial Sequence: Synthetic oligonucleotide
uccuuuugcuu

SEQ ID NO: 160589 - RNA, 15 nt, Artificial Sequence
  Description of Artificial Sequence: Synthetic oligonucleotide
uuuaaaguaauuuuu

SEQ ID NO: 160590 - RNA, 12 nt, Artificial Sequence
  Description of Artificial Sequence: Synthetic oligonucleotide
aacagucaaugg

SEQ ID NO: 160591 - RNA, 12 nt, Artificial Sequence
  Description of Artificial Sequence: Synthetic oligonucleotide
cgacaaaccaau

SEQ ID NO: 160592 - RNA, 11 nt, Artificial Sequence
  Description of Artificial Sequence: Synthetic oligonucleotide
cugcuaccacu

SEQ ID NO: 160593 - RNA, 12 nt, Artificial Sequence
  Description of Artificial Sequence: Synthetic oligonucleotide
caagcggucuua

SEQ ID NO: 160594 - RNA, 12 nt, Artificial Sequence
  Description of Artificial Sequence: Synthetic oligonucleotide
gucuuaccggcu

SEQ ID NO: 160595 - RNA, 10 nt, Artificial Sequence
  Description of Artificial Sequence: Synthetic oligonucleotide
auggguuacc

SEQ ID NO: 160596 - RNA, 10 nt, Artificial Sequence
  Description of Artificial Sequence: Synthetic oligonucleotide
uuaccugcga

SEQ ID NO: 160597 - RNA, 11 nt, Artificial Sequence
  Description of Artificial Sequence: Synthetic oligonucleotide
aucuugcugag

SEQ ID NO: 160598 - RNA, 12 nt, Artificial Sequence
  Description of Artificial Sequence: Synthetic oligonucleotide
gcauaaaacagu

SEQ ID NO: 160599 - RNA, 11 nt, Artificial Sequence
  Description of Artificial Sequence: Synthetic oligonucleotide
uccuuuauccu

SEQ ID NO: 160600 - RNA, 11 nt, Artificial Sequence
  Description of Artificial Sequence: Synthetic oligonucleotide
aacgcaaguug

SEQ ID NO: 160601 - RNA, 12 nt, Artificial Sequence
  Description of Artificial Sequence: Synthetic oligonucleotide
aacugaaaccau

SEQ ID NO: 160602 - RNA, 13 nt, Artificial Sequence
  Description of Artificial Sequence: Synthetic oligonucleotide
cuuuguuaaauau

SEQ ID NO: 160603 - RNA, 13 nt, Artificial Sequence
  Description of Artificial Sequence: Synthetic oligonucleotide
uauauuaaaaguu

SEQ ID NO: 160604 - RNA, 12 nt, Artificial Sequence
  Description of Artificial Sequence: Synthetic oligonucleotide
uuuugacuuaac

SEQ ID NO: 160605 - RNA, 12 nt, Artificial Sequence
  Description of Artificial Sequence: Synthetic oligonucleotide
caaacucagcac

SEQ ID NO: 160606 - RNA, 10 nt, Artificial Sequence
  Description of Artificial Sequence: Synthetic oligonucleotide
gcugaccuca

SEQ ID NO: 160607 - RNA, 13 nt, Artificial Sequence
  Description of Artificial Sequence: Synthetic oligonucleotide
uuauucagaucgc

SEQ ID NO: 160608 - RNA, 12 nt, Artificial Sequence
  Description of Artificial Sequence: Synthetic oligonucleotide
ggguucugggau

SEQ ID NO: 160609 - RNA, 14 nt, Artificial Sequence
  Description of Artificial Sequence: Synthetic oligonucleotide
uauuggaaauuaug

SEQ ID NO: 160610 - RNA, 12 nt, Artificial Sequence
  Description of Artificial Sequence: Synthetic oligonucleotide
uggaagcacuag

SEQ ID NO: 160611 - RNA, 12 nt, Artificial Sequence
  Description of Artificial Sequence: Synthetic oligonucleotide
uuuuuaugugga

SEQ ID NO: 160612 - RNA, 11 nt, Artificial Sequence
  Description of Artificial Sequence: Synthetic oligonucleotide
gaauugguaga

SEQ ID NO: 160613 - RNA, 12 nt, Artificial Sequence
  Description of Artificial Sequence: Synthetic oligonucleotide
uagacuuggaga

SEQ ID NO: 160614 - RNA, 12 nt, Artificial Sequence
  Description of Artificial Sequence: Synthetic oligonucleotide
uacaguauucca

SEQ ID NO: 160615 - RNA, 14 nt, Artificial Sequence
  Description of Artificial Sequence: Synthetic oligonucleotide
cacugaugaauuaa

SEQ ID NO: 160616 - RNA, 11 nt, Artificial Sequence
  Description of Artificial Sequence: Synthetic oligonucleotide
cacaucaucac

SEQ ID NO: 160617 - RNA, 12 nt, Artificial Sequence
  Description of Artificial Sequence: Synthetic oligonucleotide
ucaccaaacaga

SEQ ID NO: 160618 - RNA, 11 nt, Artificial Sequence
  Description of Artificial Sequence: Synthetic oligonucleotide
gaacaugaugg

SEQ ID NO: 160619 - RNA, 11 nt, Artificial Sequence
  Description of Artificial Sequence: Synthetic oligonucleotide
auguagacugc

SEQ ID NO: 160620 - RNA, 12 nt, Artificial Sequence
  Description of Artificial Sequence: Synthetic oligonucleotide
gaucuauuuaug

SEQ ID NO: 160621 - RNA, 11 nt, Artificial Sequence
  Description of Artificial Sequence: Synthetic oligonucleotide
cacuauuauca

SEQ ID NO: 160622 - RNA, 10 nt, Artificial Sequence
  Description of Artificial Sequence: Synthetic oligonucleotide
ucaguucugc

SEQ ID NO: 160623 - RNA, 12 nt, Artificial Sequence
  Description of Artificial Sequence: Synthetic oligonucleotide
gauuaaaccuac

SEQ ID NO: 160624 - RNA, 12 nt, Artificial Sequence
  Description of Artificial Sequence: Synthetic oligonucleotide
uaaaauccuucu

SEQ ID NO: 160625 - RNA, 11 nt, Artificial Sequence
  Description of Artificial Sequence: Synthetic oligonucleotide
augcuguagac

SEQ ID NO: 160626 - RNA, 12 nt, Artificial Sequence
  Description of Artificial Sequence: Synthetic oligonucleotide
ugauaggaauag

SEQ ID NO: 160627 - RNA, 10 nt, Artificial Sequence
  Description of Artificial Sequence: Synthetic oligonucleotide
auggcccuga

SEQ ID NO: 160628 - RNA, 10 nt, Artificial Sequence
  Description of Artificial Sequence: Synthetic oligonucleotide
uccucaagca

SEQ ID NO: 160629 - RNA, 9 nt, Artificial Sequence
  Description of Artificial Sequence: Synthetic oligonucleotide
uucagccca

SEQ ID NO: 160630 - RNA, 10 nt, Artificial Sequence
  Description of Artificial Sequence: Synthetic oligonucleotide
cugcugaacc

SEQ ID NO: 160631 - RNA, 11 nt, Artificial Sequence
  Description of Artificial Sequence: Synthetic oligonucleotide
aguucucuuca

SEQ ID NO: 160632 - RNA, 10 nt, Artificial Sequence
  Description of Artificial Sequence: Synthetic oligonucleotide
cagccuagag

SEQ ID NO: 160633 - RNA, 12 nt, Artificial Sequence
  Description of Artificial Sequence: Synthetic oligonucleotide
ucugugaagugu

SEQ ID NO: 160634 - RNA, 13 nt, Artificial Sequence
  Description of Artificial Sequence: Synthetic oligonucleotide
gagaaaauuucaa

SEQ ID NO: 160635 - RNA, 10 nt, Artificial Sequence
  Description of Artificial Sequence: Synthetic oligonucleotide
auccuccuga

SEQ ID NO: 160636 - RNA, 11 nt, Artificial Sequence
  Description of Artificial Sequence: Synthetic oligonucleotide
ugacaucauau

SEQ ID NO: 160637 - RNA, 12 nt, Artificial Sequence
  Description of Artificial Sequence: Synthetic oligonucleotide
aucuucaucaua

SEQ ID NO: 160638 - RNA, 12 nt, Artificial Sequence
  Description of Artificial Sequence: Synthetic oligonucleotide
acuagcuauuaa

SEQ ID NO: 160639 - RNA, 13 nt, Artificial Sequence
  Description of Artificial Sequence: Synthetic oligonucleotide
cucuacuaaaaau

SEQ ID NO: 160640 - RNA, 11 nt, Artificial Sequence
  Description of Artificial Sequence: Synthetic oligonucleotide
cuaucucgccu

SEQ ID NO: 160641 - RNA, 12 nt, Artificial Sequence
  Description of Artificial Sequence: Synthetic oligonucleotide
uucgguccaguu

SEQ ID NO: 160642 - RNA, 10 nt, Artificial Sequence
  Description of Artificial Sequence: Synthetic oligonucleotide
auguagccgc

SEQ ID NO: 160643 - RNA, 11 nt, Artificial Sequence
  Description of Artificial Sequence: Synthetic oligonucleotide
gaggagacuug

SEQ ID NO: 160644 - RNA, 11 nt, Artificial Sequence
  Description of Artificial Sequence: Synthetic oligonucleotide
aguagugagga

SEQ ID NO: 160645 - RNA, 13 nt, Artificial Sequence
  Description of Artificial Sequence: Synthetic oligonucleotide
agaugaguacaaa

SEQ ID NO: 160646 - RNA, 12 nt, Artificial Sequence
  Description of Artificial Sequence: Synthetic oligonucleotide
uuguuaaugggc

SEQ ID NO: 160647 - RNA, 12 nt, Artificial Sequence
  Description of Artificial Sequence: Synthetic oligonucleotide
uuuuaauuuauu

SEQ ID NO: 160648 - RNA, 11 nt, Artificial Sequence
  Description of Artificial Sequence: Synthetic oligonucleotide
auuuaaauaug

SEQ ID NO: 160649 - RNA, 12 nt, Artificial Sequence
  Description of Artificial Sequence: Synthetic oligonucleotide
auccuuuguuuc

SEQ ID NO: 160650 - RNA, 13 nt, Artificial Sequence
  Description of Artificial Sequence: Synthetic oligonucleotide
gucuaaguguuug

SEQ ID NO: 160651 - RNA, 11 nt, Artificial Sequence
  Description of Artificial Sequence: Synthetic oligonucleotide
ccugugacaaa

SEQ ID NO: 160652 - RNA, 12 nt, Artificial Sequence
  Description of Artificial Sequence: Synthetic oligonucleotide
caggcugaauua

SEQ ID NO: 160653 - RNA, 13 nt, Artificial Sequence
  Description of Artificial Sequence: Synthetic oligonucleotide
ucauucuuacaau

SEQ ID NO: 160654 - RNA, 14 nt, Artificial Sequence
  Description of Artificial Sequence: Synthetic oligonucleotide
cauucuuacaauug

SEQ ID NO: 160655 - RNA, 11 nt, Artificial Sequence
  Description of Artificial Sequence: Synthetic oligonucleotide
agagaguguac

SEQ ID NO: 160656 - RNA, 11 nt, Artificial Sequence
  Description of Artificial Sequence: Synthetic oligonucleotide
gaacucagcag

SEQ ID NO: 160657 - RNA, 12 nt, Artificial Sequence
  Description of Artificial Sequence: Synthetic oligonucleotide
uuauuuucagua

SEQ ID NO: 160658 - RNA, 11 nt, Artificial Sequence
  Description of Artificial Sequence: Synthetic oligonucleotide
cuuaaauggaa

SEQ ID NO: 160659 - RNA, 12 nt, Artificial Sequence
  Description of Artificial Sequence: Synthetic oligonucleotide
gccuaaaauugu

SEQ ID NO: 160660 - RNA, 12 nt, Artificial Sequence
  Description of Artificial Sequence: Synthetic oligonucleotide
acuaacaucugg

SEQ ID NO: 160661 - RNA, 11 nt, Artificial Sequence
  Description of Artificial Sequence: Synthetic oligonucleotide
gacugugagcu

SEQ ID NO: 160662 - RNA, 13 nt, Artificial Sequence
  Description of Artificial Sequence: Synthetic oligonucleotide
gcuuuuuauuaau

SEQ ID NO: 160663 - RNA, 12 nt, Artificial Sequence
  Description of Artificial Sequence: Synthetic oligonucleotide
ucuucuuacauu

SEQ ID NO: 160664 - RNA, 14 nt, Artificial Sequence
  Description of Artificial Sequence: Synthetic oligonucleotide
auuuguaaaaaugu

SEQ ID NO: 160665 - RNA, 14 nt, Artificial Sequence
  Description of Artificial Sequence: Synthetic oligonucleotide
ucuuaauucauauu

SEQ ID NO: 160666 - RNA, 12 nt, Artificial Sequence
  Description of Artificial Sequence: Synthetic oligonucleotide
aacuaaucauga

SEQ ID NO: 160667 - RNA, 11 nt, Artificial Sequence
  Description of Artificial Sequence: Synthetic oligonucleotide
cugcucuuggg

SEQ ID NO: 160668 - RNA, 12 nt, Artificial Sequence
  Description of Artificial Sequence: Synthetic oligonucleotide
aguagcuuugag

SEQ ID NO: 160669 - RNA, 13 nt, Artificial Sequence
  Description of Artificial Sequence: Synthetic oligonucleotide
acguaauauuuca

SEQ ID NO: 160670 - RNA, 12 nt, Artificial Sequence
  Description of Artificial Sequence: Synthetic oligonucleotide
auucucuucacu

SEQ ID NO: 160671 - RNA, 13 nt, Artificial Sequence
  Description of Artificial Sequence: Synthetic oligonucleotide
uaaugcuaagaaa

SEQ ID NO: 160672 - RNA, 11 nt, Artificial Sequence
  Description of Artificial Sequence: Synthetic oligonucleotide
cugaaaaucaa

SEQ ID NO: 160673 - RNA, 13 nt, Artificial Sequence
  Description of Artificial Sequence: Synthetic oligonucleotide
auaugauuacuuu

SEQ ID NO: 160674 - RNA, 13 nt, Artificial Sequence
  Description of Artificial Sequence: Synthetic oligonucleotide
auuuuguucuaca

SEQ ID NO: 160675 - RNA, 11 nt, Artificial Sequence
  Description of Artificial Sequence: Synthetic oligonucleotide
ccgggacucuc

SEQ ID NO: 160676 - RNA, 13 nt, Artificial Sequence
  Description of Artificial Sequence: Synthetic oligonucleotide
cuuuaaaguaaag

SEQ ID NO: 160677 - RNA, 12 nt, Artificial Sequence
  Description of Artificial Sequence: Synthetic oligonucleotide
cuggaagccugg

SEQ ID NO: 160678 - RNA, 13 nt, Artificial Sequence
  Description of Artificial Sequence: Synthetic oligonucleotide
aaacaaaagagag

SEQ ID NO: 160679 - RNA, 12 nt, Artificial Sequence
  Description of Artificial Sequence: Synthetic oligonucleotide
ucaguuaugccg

SEQ ID NO: 160680 - RNA, 12 nt, Artificial Sequence
  Description of Artificial Sequence: Synthetic oligonucleotide
aaaagaagucca

SEQ ID NO: 160681 - RNA, 10 nt, Artificial Sequence
  Description of Artificial Sequence: Synthetic oligonucleotide
ggugagguua

SEQ ID NO: 160682 - RNA, 10 nt, Artificial Sequence
  Description of Artificial Sequence: Synthetic oligonucleotide
ggaagaggac

SEQ ID NO: 160683 - RNA, 12 nt, Artificial Sequence
  Description of Artificial Sequence: Synthetic oligonucleotide
agcaaguauugu

SEQ ID NO: 160684 - RNA, 11 nt, Artificial Sequence
  Description of Artificial Sequence: Synthetic oligonucleotide
uuguagcacuc

SEQ ID NO: 160685 - RNA, 13 nt, Artificial Sequence
  Description of Artificial Sequence: Synthetic oligonucleotide
caaaaccacaaau

SEQ ID NO: 160686 - RNA, 11 nt, Artificial Sequence
  Description of Artificial Sequence: Synthetic oligonucleotide
aagcccauaca

SEQ ID NO: 160687 - RNA, 10 nt, Artificial Sequence
  Description of Artificial Sequence: Synthetic oligonucleotide
gcccauacag

SEQ ID NO: 160688 - RNA, 11 nt, Artificial Sequence
  Description of Artificial Sequence: Synthetic oligonucleotide
agaaaccuucc

SEQ ID NO: 160689 - RNA, 9 nt, Artificial Sequence
  Description of Artificial Sequence: Synthetic oligonucleotide
uauaccuac

SEQ ID NO: 160690 - RNA, 12 nt, Artificial Sequence
  Description of Artificial Sequence: Synthetic oligonucleotide
ccaguuuucgga

SEQ ID NO: 160691 - RNA, 8 nt, Artificial Sequence
  Description of Artificial Sequence: Synthetic oligonucleotide
gaacaggg

SEQ ID NO: 160692 - RNA, 12 nt, Artificial Sequence
  Description of Artificial Sequence: Synthetic oligonucleotide
uaacuuuccagu

SEQ ID NO: 160693 - RNA, 13 nt, Artificial Sequence
  Description of Artificial Sequence: Synthetic oligonucleotide
aaguuugguuuug

SEQ ID NO: 160694 - RNA, 11 nt, Artificial Sequence
  Description of Artificial Sequence: Synthetic oligonucleotide
uucccacugua

SEQ ID NO: 160695 - RNA, 12 nt, Artificial Sequence
  Description of Artificial Sequence: Synthetic oligonucleotide
gauaccauauga

SEQ ID NO: 160696 - RNA, 10 nt, Artificial Sequence
  Description of Artificial Sequence: Synthetic oligonucleotide
acaugggcug

SEQ ID NO: 160697 - RNA, 12 nt, Artificial Sequence
  Description of Artificial Sequence: Synthetic oligonucleotide
aacuuuuucaua

SEQ ID NO: 160698 - RNA, 11 nt, Artificial Sequence
  Description of Artificial Sequence: Synthetic oligonucleotide
augaggccgga

SEQ ID NO: 160699 - RNA, 10 nt, Artificial Sequence
  Description of Artificial Sequence: Synthetic oligonucleotide
cugcauuugu

SEQ ID NO: 160700 - RNA, 12 nt, Artificial Sequence
  Description of Artificial Sequence: Synthetic oligonucleotide
auguuuacuacc

SEQ ID NO: 160701 - RNA, 14 nt, Artificial Sequence
  Description of Artificial Sequence: Synthetic oligonucleotide
auuuuuugaugaaa

SEQ ID NO: 160702 - RNA, 13 nt, Artificial Sequence
  Description of Artificial Sequence: Synthetic oligonucleotide
agugugugaauuu

SEQ ID NO: 160703 - RNA, 12 nt, Artificial Sequence
  Description of Artificial Sequence: Synthetic oligonucleotide
agcaauguaugu

SEQ ID NO: 160704 - RNA, 13 nt, Artificial Sequence
  Description of Artificial Sequence: Synthetic oligonucleotide
aagcacauauaua

SEQ ID NO: 160705 - RNA, 13 nt, Artificial Sequence
  Description of Artificial Sequence: Synthetic oligonucleotide
uaauaguuucucc

SEQ ID NO: 160706 - RNA, 12 nt, Artificial Sequence
  Description of Artificial Sequence: Synthetic oligonucleotide
guuucuccaaau

SEQ ID NO: 160707 - RNA, 12 nt, Artificial Sequence
  Description of Artificial Sequence: Synthetic oligonucleotide
acuuccuagaaa

SEQ ID NO: 160708 - RNA, 12 nt, Artificial Sequence
  Description of Artificial Sequence: Synthetic oligonucleotide
acaccauauaug

SEQ ID NO: 160709 - RNA, 13 nt, Artificial Sequence
  Description of Artificial Sequence: Synthetic oligonucleotide
uauaugaauggag

SEQ ID NO: 160710 - RNA, 12 nt, Artificial Sequence
  Description of Artificial Sequence: Synthetic oligonucleotide
cauuuacaggga

SEQ ID NO: 160711 - RNA, 12 nt, Artificial Sequence
  Description of Artificial Sequence: Synthetic oligonucleotide
auuuacagggac

SEQ ID NO: 160712 - RNA, 9 nt, Artificial Sequence
  Description of Artificial Sequence: Synthetic oligonucleotide
gggaccuga

SEQ ID NO: 160713 - RNA, 13 nt, Artificial Sequence
  Description of Artificial Sequence: Synthetic oligonucleotide
guuugacugcauc

SEQ ID NO: 160714 - RNA, 12 nt, Artificial Sequence
  Description of Artificial Sequence: Synthetic oligonucleotide
uugacugcaucg

SEQ ID NO: 160715 - RNA, 11 nt, Artificial Sequence
  Description of Artificial Sequence: Synthetic oligonucleotide
aguucacaggg

SEQ ID NO: 160716 - RNA, 12 nt, Artificial Sequence
  Description of Artificial Sequence: Synthetic oligonucleotide
gcaccucugucc

SEQ ID NO: 160717 - RNA, 14 nt, Artificial Sequence
  Description of Artificial Sequence: Synthetic oligonucleotide
guuugucuuuuuaa

SEQ ID NO: 160718 - RNA, 13 nt, Artificial Sequence
  Description of Artificial Sequence: Synthetic oligonucleotide
uugucuuuuuaag

SEQ ID NO: 160719 - RNA, 12 nt, Artificial Sequence
  Description of Artificial Sequence: Synthetic oligonucleotide
cuaaagguuguc

SEQ ID NO: 160720 - RNA, 11 nt, Artificial Sequence
  Description of Artificial Sequence: Synthetic oligonucleotide
agguugucgac

SEQ ID NO: 160721 - RNA, 12 nt, Artificial Sequence
  Description of Artificial Sequence: Synthetic oligonucleotide
ccuggcaauugu

SEQ ID NO: 160722 - RNA, 11 nt, Artificial Sequence
  Description of Artificial Sequence: Synthetic oligonucleotide
guggugcgagg

SEQ ID NO: 160723 - RNA, 12 nt, Artificial Sequence
  Description of Artificial Sequence: Synthetic oligonucleotide
gagacaugaaau

SEQ ID NO: 160724 - RNA, 12 nt, Artificial Sequence
  Description of Artificial Sequence: Synthetic oligonucleotide
uauauuucucca

SEQ ID NO: 160725 - RNA, 9 nt, Artificial Sequence
  Description of Artificial Sequence: Synthetic oligonucleotide
augaaggcu

SEQ ID NO: 160726 - RNA, 10 nt, Artificial Sequence
  Description of Artificial Sequence: Synthetic oligonucleotide
cuggaguggu

SEQ ID NO: 160727 - RNA, 10 nt, Artificial Sequence
  Description of Artificial Sequence: Synthetic oligonucleotide
ggaagagagg

SEQ ID NO: 160728 - RNA, 11 nt, Artificial Sequence
  Description of Artificial Sequence: Synthetic oligonucleotide
uugcaucgggc

SEQ ID NO: 160729 - RNA, 12 nt, Artificial Sequence
  Description of Artificial Sequence: Synthetic oligonucleotide
uauccuacugug

SEQ ID NO: 160730 - RNA, 12 nt, Artificial Sequence
  Description of Artificial Sequence: Synthetic oligonucleotide
ccuacuguguaa

SEQ ID NO: 160731 - RNA, 11 nt, Artificial Sequence
  Description of Artificial Sequence: Synthetic oligonucleotide
cuuguagugua

SEQ ID NO: 160732 - RNA, 12 nt, Artificial Sequence
  Description of Artificial Sequence: Synthetic oligonucleotide
cuuuguugauug

SEQ ID NO: 160733 - RNA, 13 nt, Artificial Sequence
  Description of Artificial Sequence: Synthetic oligonucleotide
uuguugauugaaa

SEQ ID NO: 160734 - RNA, 14 nt, Artificial Sequence
  Description of Artificial Sequence: Synthetic oligonucleotide
ucuuuuucuuccau

SEQ ID NO: 160735 - RNA, 12 nt, Artificial Sequence
  Description of Artificial Sequence: Synthetic oligonucleotide
aucuuccuucua

SEQ ID NO: 160736 - RNA, 12 nt, Artificial Sequence
  Description of Artificial Sequence: Synthetic oligonucleotide
ugaaugcuucau

SEQ ID NO: 160737 - RNA, 12 nt, Artificial Sequence
  Description of Artificial Sequence: Synthetic oligonucleotide
gaaugcuucaug

SEQ ID NO: 160738 - RNA, 12 nt, Artificial Sequence
  Description of Artificial Sequence: Synthetic oligonucleotide
auucuacuuuga

SEQ ID NO: 160739 - RNA, 12 nt, Artificial Sequence
  Description of Artificial Sequence: Synthetic oligonucleotide
gcaacuacagac

SEQ ID NO: 160740 - RNA, 12 nt, Artificial Sequence
  Description of Artificial Sequence: Synthetic oligonucleotide
accaaggucaac

SEQ ID NO: 160741 - RNA, 12 nt, Artificial Sequence
  Description of Artificial Sequence: Synthetic oligonucleotide
gacuaucucgac

SEQ ID NO: 160742 - RNA, 12 nt, Artificial Sequence
  Description of Artificial Sequence: Synthetic oligonucleotide
accuucccaaac

SEQ ID NO: 160743 - RNA, 13 nt, Artificial Sequence
  Description of Artificial Sequence: Synthetic oligonucleotide
caagcuuagaacu

SEQ ID NO: 160744 - RNA, 14 nt, Artificial Sequence
  Description of Artificial Sequence: Synthetic oligonucleotide
gcuuagaacuuuaa

SEQ ID NO: 160745 - RNA, 13 nt, Artificial Sequence
  Description of Artificial Sequence: Synthetic oligonucleotide
aacuuuaagcaac

SEQ ID NO: 160746 - RNA, 10 nt, Artificial Sequence
  Description of Artificial Sequence: Synthetic oligonucleotide
agaccaccac

SEQ ID NO: 160747 - RNA, 13 nt, Artificial Sequence
  Description of Artificial Sequence: Synthetic oligonucleotide
cgagaaauaaagu

SEQ ID NO: 160748 - RNA, 13 nt, Artificial Sequence
  Description of Artificial Sequence: Synthetic oligonucleotide
gagaaauaaaguu

SEQ ID NO: 160749 - RNA, 11 nt, Artificial Sequence
  Description of Artificial Sequence: Synthetic oligonucleotide
ggaaaugaucc

SEQ ID NO: 160750 - RNA, 12 nt, Artificial Sequence
  Description of Artificial Sequence: Synthetic oligonucleotide
aagaaaugaaac

SEQ ID NO: 160751 - RNA, 12 nt, Artificial Sequence
  Description of Artificial Sequence: Synthetic oligonucleotide
uuuccauccucc

SEQ ID NO: 160752 - RNA, 14 nt, Artificial Sequence
  Description of Artificial Sequence: Synthetic oligonucleotide
cugaaaaucuuuga

SEQ ID NO: 160753 - RNA, 10 nt, Artificial Sequence
  Description of Artificial Sequence: Synthetic oligonucleotide
gccguucagg

SEQ ID NO: 160754 - RNA, 12 nt, Artificial Sequence
  Description of Artificial Sequence: Synthetic oligonucleotide
aggguccagaag

SEQ ID NO: 160755 - RNA, 12 nt, Artificial Sequence
  Description of Artificial Sequence: Synthetic oligonucleotide
caagacugcuug

SEQ ID NO: 160756 - RNA, 12 nt, Artificial Sequence
  Description of Artificial Sequence: Synthetic oligonucleotide
ccaugucuuugg

SEQ ID NO: 160757 - RNA, 10 nt, Artificial Sequence
  Description of Artificial Sequence: Synthetic oligonucleotide
ccugaaacac

SEQ ID NO: 160758 - RNA, 11 nt, Artificial Sequence
  Description of Artificial Sequence: Synthetic oligonucleotide
cucuguaccuc

SEQ ID NO: 160759 - RNA, 11 nt, Artificial Sequence
  Description of Artificial Sequence: Synthetic oligonucleotide
gcaagacaaga

SEQ ID NO: 160760 - RNA, 12 nt, Artificial Sequence
  Description of Artificial Sequence: Synthetic oligonucleotide
caagacaagaaa

SEQ ID NO: 160761 - RNA, 11 nt, Artificial Sequence
  Description of Artificial Sequence: Synthetic oligonucleotide
guacaagaucc

SEQ ID NO: 160762 - RNA, 11 nt, Artificial Sequence
  Description of Artificial Sequence: Synthetic oligonucleotide
guacuugcaga

SEQ ID NO: 160763 - RNA, 12 nt, Artificial Sequence
  Description of Artificial Sequence: Synthetic oligonucleotide
gaucgauacaga

SEQ ID NO: 160764 - RNA, 12 nt, Artificial Sequence
  Description of Artificial Sequence: Synthetic oligonucleotide
auaaaaauaaau

SEQ ID NO: 160765 - RNA, 12 nt, Artificial Sequence
  Description of Artificial Sequence: Synthetic oligonucleotide
aaaaauaaauau

SEQ ID NO: 160766 - RNA, 12 nt, Artificial Sequence
  Description of Artificial Sequence: Synthetic oligonucleotide
uugacugcugug

SEQ ID NO: 160767 - RNA, 12 nt, Artificial Sequence
  Description of Artificial Sequence: Synthetic oligonucleotide
gagaugagagac

SEQ ID NO: 160768 - RNA, 9 nt, Artificial Sequence
  Description of Artificial Sequence: Synthetic oligonucleotide
cccacuugg

SEQ ID NO: 160769 - RNA, 5911 nt, Homo sapiens
agaugcaggggcgcaaacgccaaaggagaccaggcuguaggaagagaagggcagagcgccggacagcucggcccgcuccccguccuuuggggccgcggcuggggaacuacaaggcccagcaggcagcugcagggggcggaggcggaggagggaccagcgcgggugggagugagagagcgagcccucgcgccccgccggcgcauagcgcucggagcgcucuugcggccacaggcgcggcguccucggcggcgggcggcagcuagcgggagccgggacgccggugcagccgcagcgcgcggaggaacccgggugugccgggagcugggcggccacguccggacgggaccgagaccccucguagcgcauugcggcgaccucgccuuccccggccgcgagcgcgccgcugcuugaaaagccgcggaacccaaggacuuuucuccgguccgagcucggggcgccccgcagggcgcacgguacccgugcugcagucgggcacgccgcggcgccggggccuccgcagggcgauggagcccggucugcaaggaaagugaggcgccgccgcugcguucuggaggaggggggcacaaggucuggagaccccggguggcggacgggagcccuccccccgccccgccuccggggcaccagcuccggcuccauuguucccgcccgggcuggaggcgccgagcaccgagcgccgccgggagucgagcgccggccgcggagcucuugcgaccccgccaggacccgaacagagcccgggggcggcgggccggagccggggacgcgggcacacgcccgcucgcacaagccacggcggacucucccgaggcggaaccuccacgccgagcgagggucaguuugaaaaggaggaucgagcucacuguggaguauccauggagauguggagccuugucaccaaccucuaacugcagaacugggauguggagcuggaagugccuccucuucugggcugugcuggucacagccacacucugcaccgcuaggccguccccgaccuugccugaacaagcccagcccuggggagccccuguggaaguggaguccuuccugguccaccccggugaccugcugcagcuucgcugucggcugcgggacgaugugcagagcaucaacuggcugcgggacggggugcagcuggcggaaagcaaccgcacccgcaucacaggggaggagguggaggugcaggacuccgugcccgcagacuccggccucuaugcuugcguaaccagcagccccucgggcagugacaccaccuacuucuccgucaauguuucagaugcucuccccuccucggaggaugaugaugaugaugaugacuccucuucagaggagaaagaaacagauaacaccaaaccaaaccccguagcuccauauuggacauccccagaaaagauggaaaagaaauugcaugcagugccggcugccaagacagugaaguucaaaugcccuuccagugggaccccaaaccccacacugcgcugguugaaaaauggcaaagaauucaaaccugaccacagaauuggaggcuacaagguccguuaugccaccuggagcaucauaauggacucuguggugcccucugacaagggcaacuacaccugcauuguggagaaugaguacggcagcaucaaccacacauaccagcuggaugucguggagcgguccccucaccggcccauccugcaagcaggguugcccgccaacaaaacaguggcccuggguagcaacguggaguucauguguaagguguacagugacccgcagccgcacauccaguggcuaaagcacaucgaggugaaugggagcaagauuggcccagacaaccugccuuauguccagaucuugaagacugcuggaguuaauaccaccgacaaagagauggaggugcuucacuuaagaaaugucuccuuugaggacgcaggggaguauacgugcuuggcggguaacucuaucggacucucccaucacucugcaugguugaccguucuggaagcccuggaagagaggccggcagugaugaccucgccccuguaccuggagaucaucaucuauugcacaggggccuuccucaucuccugcaugguggggucggucaucgucuacaagaugaagagugguaccaagaagagugacuuccacagccagauggcugugcacaagcuggccaagagcaucccucugcgcagacagguaacagugucugcugacuccagugcauccaugaacucugggguucuucugguucggccaucacggcucuccuccagugggacucccaugcuagcaggggucucugaguaugagcuucccgaagacccucgcugggagcugccucgggacagacuggucuuaggcaaaccccugggagagggcugcuuugggcaggugguguuggcagaggcuaucgggcuggacaaggacaaacccaaccgugugaccaaaguggcugugaagauguugaagucggacgcaacagagaaagacuugucagaccugaucucagaaauggagaugaugaagaugaucgggaagcauaagaauaucaucaaccugcugggggccugcacgcaggauggucccuuguaugucaucguggaguaugccuccaagggcaaccugcgggaguaccugcaggcccggaggcccccagggcuggaauacugcuacaaccccagccacaacccagaggagcagcucuccuccaaggaccugguguccugcgccuaccagguggcccgaggcauggaguaucuggccuccaagaagugcauacaccgagaccuggcagccaggaauguccuggugacagaggacaaugugaugaagauagcagacuuuggccucgcacgggacauucaccacaucgacuacuauaaaaagacaaccaacggccgacugccugugaaguggauggcacccgaggcauuauuugaccggaucuacacccaccagagugauguguggucuuucggggugcuccugugggagaucuucacucugggcggcuccccauaccccggugugccuguggaggaacuuuucaagcugcugaaggagggucaccgcauggacaagcccaguaacugcaccaacgagcuguacaugaugaugcgggacugcuggcaugcagugcccucacagagacccaccuucaagcagcugguggaagaccuggaccgcaucguggccuugaccuccaaccaggaguaccuggaccuguccaugccccuggaccaguacucccccagcuuucccgacacccggagcucuacgugcuccucaggggaggauuccgucuucucucaugagccgcugcccgaggagcccugccugccccgacacccagcccagcuugccaauggcggacucaaacgccgcugacugccacccacacgcccuccccagacuccaccgucagcuguaacccucacccacagccccugcugggcccaccaccuguccgucccuguccccuuuccugcuggcaggagccggcugccuaccaggggccuuccuguguggccugccuucaccccacucagcucaccucucccuccaccuccucuccaccugcuggugagaggugcaaagaggcagaucuuugcugccagccacuucauccccucccagauguuggaccaacaccccucccugccaccaggcacugccuggagggcagggagugggagccaaugaacaggcaugcaagugagagcuuccugagcuuucuccugucgguuuggucuguuuugccuucacccauaagccccucgcacucugguggcaggugccuuguccucagggcuacagcaguagggaggucagugcuucgugccucgauugaaggugaccucugccccagauagguggugccaguggcuuauuaauuccgauacuaguuugcuuugcugaccaaaugccugguaccagaggauggugaggcgaaggccagguugggggcaguguuguggcccuggggcccagccccaaacugggggcucuguauauagcuaugaagaaaacacaaaguguauaaaucugaguauauauuuacaugucuuuuuaaaagggucguuaccagagauuuacccaucggguaagaugcuccugguggcugggaggcaucaguugcuauauauuaaaaacaaaaaagaaaaaaaaggaaaauguuuuuaaaaaggucauauauuuuuugcuacuuuugcuguuuuauuuuuuuaaauuauguucuaaaccuauuuucaguuuaggucccucaauaaaaauugcugcugcuucauuuaucuaugggcuguaugaaaagggugggaauguccacuggaaagaagggacacccacgggcccuggggcuaggucugucccgagggcaccgcaugcucccggcgcagguuccuuguaaccucuucuuccuagguccugcacccagaccucacgacgcaccuccugccucuccgcugcuuuuggaaagucagaaaaagaagaugucugcuucgagggcaggaaccccauccaugcaguagaggcgcugggcagagagucaaggcccagcagccaucgaccauggaugguuuccuccaaggaaaccggugggguugggcuggggagggggcaccuaccuaggaauagccacgggguagagcuacagugauuaagaggaaagcaagggcgcgguugcucacgccuguaaucccagcacuuugggacaccgaggugggcagaucacuucaggucaggaguuugagaccagccuggccaacuuagugaaaccccaucucuacuaaaaaugcaaaaauuauccaggcaugguggcacacgccuguaaucccagcuccacaggaggcugaggcagaaucccuugaagcugggaggcggagguugcagugagccgagauugcgccauugcacuccagccugggcaacagagaaaacaaaaaggaaaacaaaugaugaaggucugcagaaacugaaacccagacaugugucugcccccucuaugugggcaugguuuugccagugcuucuaagugcaggagaacaugucaccugaggcuaguuuugcauucaggucccuggcuucguuucuuguugguaugccuccccagaucguccuuccuguauccaugugaccagacuguauuuguugggacugucgcagaucuuggcuucuuacaguucuuccuguccaaacuccauccugucccucaggaacggggggaaaauucuccgaauguuuuugguuuuuuggcugcuuggaauuuacuucugccaccugcuggucaucacuguccucacuaaguggauucuggcucccccguaccucauggcucaaacuaccacuccucagucgcuauauuaaagcuuauauuuugcuggauuacugcuaaauacaaaagaaaguucaauauguuuucauuucuguagggaaaaugggauugcugcuuuaaauuucugagcuagggauuuuuuggcagcugcaguguuggcgacuauuguaaaauucucuuuguuucucucuguaaauagcaccugcuaacauuacaauuuguauuuauguuuaaagaaggcaucauuuggugaacagaacuaggaaaugaauuuuuagcucuuaaaagcauuugcuuugagaccgcacaggagugucuuuccuuguaaaacagugaugauaauuucugccuuggcccuaccuugaagcaauguugugugaagggaugaagaaucuaaaagucuucauaaguccuugggagaggugcuagaaaaauauaaggcacuaucauaauuacagugauguccuugcuguuacuacucaaaucacccacaaauuuccccaaagacugcgcuagcugucaaauaaaagacagugaaauugaccugaaaaaaaaaaaaaaaaa

SEQ ID NO: 160770 - RNA, 5644 nt, Homo sapiens
agaugcaggggcgcaaacgccaaaggagaccaggcuguaggaagagaagggcagagcgccggacagcucggcccgcuccccguccuuuggggccgcggcuggggaacuacaaggcccagcaggcagcugcagggggcggaggcggaggagggaccagcgcgggugggagugagagagcgagcccucgcgccccgccggcgcauagcgcucggagcgcucuugcggccacaggcgcggcguccucggcggcgggcggcagcuagcgggagccgggacgccggugcagccgcagcgcgcggaggaacccgggugugccgggagcugggcggccacguccggacgggaccgagaccccucguagcgcauugcggcgaccucgccuuccccggccgcgagcgcgccgcugcuugaaaagccgcggaacccaaggacuuuucuccgguccgagcucggggcgccccgcagggcgcacgguacccgugcugcagucgggcacgccgcggcgccggggccuccgcagggcgauggagcccggucugcaaggaaagugaggcgccgccgcugcguucuggaggaggggggcacaaggucuggagaccccggguggcggacgggagcccuccccccgccccgccuccggggcaccagcuccggcuccauuguucccgcccgggcuggaggcgccgagcaccgagcgccgccgggagucgagcgccggccgcggagcucuugcgaccccgccaggacccgaacagagcccgggggcggcgggccggagccggggacgcgggcacacgcccgcucgcacaagccacggcggacucucccgaggcggaaccuccacgccgagcgagggucaguuugaaaaggaggaucgagcucacuguggaguauccauggagauguggagccuugucaccaaccucuaacugcagaacugggauguggagcuggaagugccuccucuucugggcugugcuggucacagccacacucugcaccgcuaggccguccccgaccuugccugaacaagaugcucuccccuccucggaggaugaugaugaugaugaugacuccucuucagaggagaaagaaacagauaacaccaaaccaaaccccguagcuccauauuggacauccccagaaaagauggaaaagaaauugcaugcagugccggcugccaagacagugaaguucaaaugcccuuccagugggaccccaaaccccacacugcgcugguugaaaaauggcaaagaauucaaaccugaccacagaauuggaggcuacaagguccguuaugccaccuggagcaucauaauggacucuguggugcccucugacaagggcaacuacaccugcauuguggagaaugaguacggcagcaucaaccacacauaccagcuggaugucguggagcgguccccucaccggcccauccugcaagcaggguugcccgccaacaaaacaguggcccuggguagcaacguggaguucauguguaagguguacagugacccgcagccgcacauccaguggcuaaagcacaucgaggugaaugggagcaagauuggcccagacaaccugccuuauguccagaucuugaagacugcuggaguuaauaccaccgacaaagagauggaggugcuucacuuaagaaaugucuccuuugaggacgcaggggaguauacgugcuuggcggguaacucuaucggacucucccaucacucugcaugguugaccguucuggaagcccuggaagagaggccggcagugaugaccucgccccuguaccuggagaucaucaucuauugcacaggggccuuccucaucuccugcaugguggggucggucaucgucuacaagaugaagagugguaccaagaagagugacuuccacagccagauggcugugcacaagcuggccaagagcaucccucugcgcagacagguaacagugucugcugacuccagugcauccaugaacucugggguucuucugguucggccaucacggcucuccuccagugggacucccaugcuagcaggggucucugaguaugagcuucccgaagacccucgcugggagcugccucgggacagacuggucuuaggcaaaccccugggagagggcugcuuugggcaggugguguuggcagaggcuaucgggcuggacaaggacaaacccaaccgugugaccaaaguggcugugaagauguugaagucggacgcaacagagaaagacuugucagaccugaucucagaaauggagaugaugaagaugaucgggaagcauaagaauaucaucaaccugcugggggccugcacgcaggauggucccuuguaugucaucguggaguaugccuccaagggcaaccugcgggaguaccugcaggcccggaggcccccagggcuggaauacugcuacaaccccagccacaacccagaggagcagcucuccuccaaggaccugguguccugcgccuaccagguggcccgaggcauggaguaucuggccuccaagaagugcauacaccgagaccuggcagccaggaauguccuggugacagaggacaaugugaugaagauagcagacuuuggccucgcacgggacauucaccacaucgacuacuauaaaaagacaaccaacggccgacugccugugaaguggauggcacccgaggcauuauuugaccggaucuacacccaccagagugauguguggucuuucggggugcuccugugggagaucuucacucugggcggcuccccauaccccggugugccuguggaggaacuuuucaagcugcugaaggagggucaccgcauggacaagcccaguaacugcaccaacgagcuguacaugaugaugcgggacugcuggcaugcagugcccucacagagacccaccuucaagcagcugguggaagaccuggaccgcaucguggccuugaccuccaaccaggaguaccuggaccuguccaugccccuggaccaguacucccccagcuuucccgacacccggagcucuacgugcuccucaggggaggauuccgucuucucucaugagccgcugcccgaggagcccugccugccccgacacccagcccagcuugccaauggcggacucaaacgccgcugacugccacccacacgcccuccccagacuccaccgucagcuguaacccucacccacagccccugcugggcccaccaccuguccgucccuguccccuuuccugcuggcaggagccggcugccuaccaggggccuuccuguguggccugccuucaccccacucagcucaccucucccuccaccuccucuccaccugcuggugagaggugcaaagaggcagaucuuugcugccagccacuucauccccucccagauguuggaccaacaccccucccugccaccaggcacugccuggagggcagggagugggagccaaugaacaggcaugcaagugagagcuuccugagcuuucuccugucgguuuggucuguuuugccuucacccauaagccccucgcacucugguggcaggugccuuguccucagggcuacagcaguagggaggucagugcuucgugccucgauugaaggugaccucugccccagauagguggugccaguggcuuauuaauuccgauacuaguuugcuuugcugaccaaaugccugguaccagaggauggugaggcgaaggccagguugggggcaguguuguggcccuggggcccagccccaaacugggggcucuguauauagcuaugaagaaaacacaaaguguauaaaucugaguauauauuuacaugucuuuuuaaaagggucguuaccagagauuuacccaucggguaagaugcuccugguggcugggaggcaucaguugcuauauauuaaaaacaaaaaagaaaaaaaaggaaaauguuuuuaaaaaggucauauauuuuuugcuacuuuugcuguuuuauuuuuuuaaauuauguucuaaaccuauuuucaguuuaggucccucaauaaaaauugcugcugcuucauuuaucuaugggcuguaugaaaagggugggaauguccacuggaaagaagggacacccacgggcccuggggcuaggucugucccgagggcaccgcaugcucccggcgcagguuccuuguaaccucuucuuccuagguccugcacccagaccucacgacgcaccuccugccucuccgcugcuuuuggaaagucagaaaaagaagaugucugcuucgagggcaggaaccccauccaugcaguagaggcgcugggcagagagucaaggcccagcagccaucgaccauggaugguuuccuccaaggaaaccggugggguugggcuggggagggggcaccuaccuaggaauagccacgggguagagcuacagugauuaagaggaaagcaagggcgcgguugcucacgccuguaaucccagcacuuugggacaccgaggugggcagaucacuucaggucaggaguuugagaccagccuggccaacuuagugaaaccccaucucuacuaaaaaugcaaaaauuauccaggcaugguggcacacgccuguaaucccagcuccacaggaggcugaggcagaaucccuugaagcugggaggcggagguugcagugagccgagauugcgccauugcacuccagccugggcaacagagaaaacaaaaaggaaaacaaaugaugaaggucugcagaaacugaaacccagacaugugucugcccccucuaugugggcaugguuuugccagugcuucuaagugcaggagaacaugucaccugaggcuaguuuugcauucaggucccuggcuucguuucuuguugguaugccuccccagaucguccuuccuguauccaugugaccagacuguauuuguugggacugucgcagaucuuggcuucuuacaguucuuccuguccaaacuccauccugucccucaggaacggggggaaaauucuccgaauguuuuugguuuuuuggcugcuuggaauuuacuucugccaccugcuggucaucacuguccucacuaaguggauucuggcucccccguaccucauggcucaaacuaccacuccucagucgcuauauuaaagcuuauauuuugcuggauuacugcuaaauacaaaagaaaguucaauauguuuucauuucuguagggaaaaugggauugcugcuuuaaauuucugagcuagggauuuuuuggcagcugcaguguuggcgacuauuguaaaauucucuuuguuucucucuguaaauagcaccugcuaacauuacaauuuguauuuauguuuaaagaaggcaucauuuggugaacagaacuaggaaaugaauuuuuagcucuuaaaagcauuugcuuugagaccgcacaggagugucuuuccuuguaaaacagugaugauaauuucugccuuggcccuaccuugaagcaauguugugugaagggaugaagaaucuaaaagucuucauaaguccuugggagaggugcuagaaaaauauaaggcacuaucauaauuacagugauguccuugcuguuacuacucaaaucacccacaaauuuccccaaagacugcgcuagcugucaaauaaaagacagugaaauugaccugaaaaaaaaaaaaaaaaa

SEQ ID NO: 160771 - RNA, 5650 nt, Homo sapiens
agaugcaggggcgcaaacgccaaaggagaccaggcuguaggaagagaagggcagagcgccggacagcucggcccgcuccccguccuuuggggccgcggcuggggaacuacaaggcccagcaggcagcugcagggggcggaggcggaggagggaccagcgcgggugggagugagagagcgagcccucgcgccccgccggcgcauagcgcucggagcgcucuugcggccacaggcgcggcguccucggcggcgggcggcagcuagcgggagccgggacgccggugcagccgcagcgcgcggaggaacccgggugugccgggagcugggcggccacguccggacgggaccgagaccccucguagcgcauugcggcgaccucgccuuccccggccgcgagcgcgccgcugcuugaaaagccgcggaacccaaggacuuuucuccgguccgagcucggggcgccccgcagggcgcacgguacccgugcugcagucgggcacgccgcggcgccggggccuccgcagggcgauggagcccggucugcaaggaaagugaggcgccgccgcugcguucuggaggaggggggcacaaggucuggagaccccggguggcggacgggagcccuccccccgccccgccuccggggcaccagcuccggcuccauuguucccgcccgggcuggaggcgccgagcaccgagcgccgccgggagucgagcgccggccgcggagcucuugcgaccccgccaggacccgaacagagcccgggggcggcgggccggagccggggacgcgggcacacgcccgcucgcacaagccacggcggacucucccgaggcggaaccuccacgccgagcgagggucaguuugaaaaggaggaucgagcucacuguggaguauccauggagauguggagccuugucaccaaccucuaacugcagaacugggauguggagcuggaagugccuccucuucugggcugugcuggucacagccacacucugcaccgcuaggccguccccgaccuugccugaacaagaugcucuccccuccucggaggaugaugaugaugaugaugacuccucuucagaggagaaagaaacagauaacaccaaaccaaaccguaugcccguagcuccauauuggacauccccagaaaagauggaaaagaaauugcaugcagugccggcugccaagacagugaaguucaaaugcccuuccagugggaccccaaaccccacacugcgcugguugaaaaauggcaaagaauucaaaccugaccacagaauuggaggcuacaagguccguuaugccaccuggagcaucauaauggacucuguggugcccucugacaagggcaacuacaccugcauuguggagaaugaguacggcagcaucaaccacacauaccagcuggaugucguggagcgguccccucaccggcccauccugcaagcaggguugcccgccaacaaaacaguggcccuggguagcaacguggaguucauguguaagguguacagugacccgcagccgcacauccaguggcuaaagcacaucgaggugaaugggagcaagauuggcccagacaaccugccuuauguccagaucuugaagacugcuggaguuaauaccaccgacaaagagauggaggugcuucacuuaagaaaugucuccuuugaggacgcaggggaguauacgugcuuggcggguaacucuaucggacucucccaucacucugcaugguugaccguucuggaagcccuggaagagaggccggcagugaugaccucgccccuguaccuggagaucaucaucuauugcacaggggccuuccucaucuccugcaugguggggucggucaucgucuacaagaugaagagugguaccaagaagagugacuuccacagccagauggcugugcacaagcuggccaagagcaucccucugcgcagacagguaacagugucugcugacuccagugcauccaugaacucugggguucuucugguucggccaucacggcucuccuccagugggacucccaugcuagcaggggucucugaguaugagcuucccgaagacccucgcugggagcugccucgggacagacuggucuuaggcaaaccccugggagagggcugcuuugggcaggugguguuggcagaggcuaucgggcuggacaaggacaaacccaaccgugugaccaaaguggcugugaagauguugaagucggacgcaacagagaaagacuugucagaccugaucucagaaauggagaugaugaagaugaucgggaagcauaagaauaucaucaaccugcugggggccugcacgcaggauggucccuuguaugucaucguggaguaugccuccaagggcaaccugcgggaguaccugcaggcccggaggcccccagggcuggaauacugcuacaaccccagccacaacccagaggagcagcucuccuccaaggaccugguguccugcgccuaccagguggcccgaggcauggaguaucuggccuccaagaagugcauacaccgagaccuggcagccaggaauguccuggugacagaggacaaugugaugaagauagcagacuuuggccucgcacgggacauucaccacaucgacuacuauaaaaagacaaccaacggccgacugccugugaaguggauggcacccgaggcauuauuugaccggaucuacacccaccagagugauguguggucuuucggggugcuccugugggagaucuucacucugggcggcuccccauaccccggugugccuguggaggaacuuuucaagcugcugaaggagggucaccgcauggacaagcccaguaacugcaccaacgagcuguacaugaugaugcgggacugcuggcaugcagugcccucacagagacccaccuucaagcagcugguggaagaccuggaccgcaucguggccuugaccuccaaccaggaguaccuggaccuguccaugccccuggaccaguacucccccagcuuucccgacacccggagcucuacgugcuccucaggggaggauuccgucuucucucaugagccgcugcccgaggagcccugccugccccgacacccagcccagcuugccaauggcggacucaaacgccgcugacugccacccacacgcccuccccagacuccaccgucagcuguaacccucacccacagccccugcugggcccaccaccuguccgucccuguccccuuuccugcuggcaggagccggcugccuaccaggggccuuccuguguggccugccuucaccccacucagcucaccucucccuccaccuccucuccaccugcuggugagaggugcaaagaggcagaucuuugcugccagccacuucauccccucccagauguuggaccaacaccccucccugccaccaggcacugccuggagggcagggagugggagccaaugaacaggcaugcaagugagagcuuccugagcuuucuccugucgguuuggucuguuuugccuucacccauaagccccucgcacucugguggcaggugccuuguccucagggcuacagcaguagggaggucagugcuucgugccucgauugaaggugaccucugccccagauagguggugccaguggcuuauuaauuccgauacuaguuugcuuugcugaccaaaugccugguaccagaggauggugaggcgaaggccagguugggggcaguguuguggcccuggggcccagccccaaacugggggcucuguauauagcuaugaagaaaacacaaaguguauaaaucugaguauauauuuacaugucuuuuuaaaagggucguuaccagagauuuacccaucggguaagaugcuccugguggcugggaggcaucaguugcuauauauuaaaaacaaaaaagaaaaaaaaggaaaauguuuuuaaaaaggucauauauuuuuugcuacuuuugcuguuuuauuuuuuuaaauuauguucuaaaccuauuuucaguuuaggucccucaauaaaaauugcugcugcuucauuuaucuaugggcuguaugaaaagggugggaauguccacuggaaagaagggacacccacgggcccuggggcuaggucugucccgagggcaccgcaugcucccggcgcagguuccuuguaaccucuucuuccuagguccugcacccagaccucacgacgcaccuccugccucuccgcugcuuuuggaaagucagaaaaagaagaugucugcuucgagggcaggaaccccauccaugcaguagaggcgcugggcagagagucaaggcccagcagccaucgaccauggaugguuuccuccaaggaaaccggugggguugggcuggggagggggcaccuaccuaggaauagccacgggguagagcuacagugauuaagaggaaagcaagggcgcgguugcucacgccuguaaucccagcacuuugggacaccgaggugggcagaucacuucaggucaggaguuugagaccagccuggccaacuuagugaaaccccaucucuacuaaaaaugcaaaaauuauccaggcaugguggcacacgccuguaaucccagcuccacaggaggcugaggcagaaucccuugaagcugggaggcggagguugcagugagccgagauugcgccauugcacuccagccugggcaacagagaaaacaaaaaggaaaacaaaugaugaaggucugcagaaacugaaacccagacaugugucugcccccucuaugugggcaugguuuugccagugcuucuaagugcaggagaacaugucaccugaggcuaguuuugcauucaggucccuggcuucguuucuuguugguaugccuccccagaucguccuuccuguauccaugugaccagacuguauuuguugggacugucgcagaucuuggcuucuuacaguucuuccuguccaaacuccauccugucccucaggaacggggggaaaauucuccgaauguuuuugguuuuuuggcugcuuggaauuuacuucugccaccugcuggucaucacuguccucacuaaguggauucuggcucccccguaccucauggcucaaacuaccacuccucagucgcuauauuaaagcuuauauuuugcuggauuacugcuaaauacaaaagaaaguucaauauguuuucauuucuguagggaaaaugggauugcugcuuuaaauuucugagcuagggauuuuuuggcagcugcaguguuggcgacuauuguaaaauucucuuuguuucucucuguaaauagcaccugcuaacauuacaauuuguauuuauguuuaaagaaggcaucauuuggugaacagaacuaggaaaugaauuuuuagcucuuaaaagcauuugcuuugagaccgcacaggagugucuuuccuuguaaaacagugaugauaauuucugccuuggcccuaccuugaagcaauguugugugaagggaugaagaaucuaaaagucuucauaaguccuugggagaggugcuagaaaaauauaaggcacuaucauaauuacagugauguccuugcuguuacuacucaaaucacccacaaauuuccccaaagacugcgcuagcugucaaauaaaagacagugaaauugaccugaaaaaaaaaaaaaaaaa

SEQ ID NO: 160772 - RNA, 2807 nt, Homo sapiens
agaugcaggggcgcaaacgccaaaggagaccaggcuguaggaagagaagggcagagcgccggacagcucggcccgcuccccguccuuuggggccgcggcuggggaacuacaaggcccagcaggcagcugcagggggcggaggcggaggagggaccagcgcgggugggagugagagagcgagcccucgcgccccgccggcgcauagcgcucggagcgcucuugcggccacaggcgcggcguccucggcggcgggcggcagcuagcgggagccgggacgccggugcagccgcagcgcgcggaggaacccgggugugccgggagcugggcggccacguccggacgggaccgagaccccucguagcgcauugcggcgaccucgccuuccccggccgcgagcgcgccgcugcuugaaaagccgcggaacccaaggacuuuucuccgguccgagcucggggcgccccgcagggcgcacgguacccgugcugcagucgggcacgccgcggcgccggggccuccgcagggcgauggagcccggucugcaaggaaagugaggcgccgccgcugcguucuggaggaggggggcacaaggucuggagaccccggguggcggacgggagcccuccccccgccccgccuccggggcaccagcuccggcuccauuguucccgcccgggcuggaggcgccgagcaccgagcgccgccgggagucgagcgccggccgcggagcucuugcgaccccgccaggacccgaacagagcccgggggcggcgggccggagccggggacgcgggcacacgcccgcucgcacaagccacggcggacucucccgaggcggaaccuccacgccgagcgagggucaguuugaaaaggaggaucgagcucacuguggaguauccauggagauguggagccuugucaccaaccucuaacugcagaacugggauguggagcuggaagugccuccucuucugggcugugcuggucacagccacacucugcaccgcuaggccguccccgaccuugccugaacaagaugcucuccccuccucggaggaugaugaugaugaugaugacuccucuucagaggagaaagaaacagauaacaccaaaccaaaccguaugcccguagcuccauauuggacauccccagaaaagauggaaaagaaauugcaugcagugccggcugccaagacagugaaguucaaaugcccuuccagugggaccccaaaccccacacugcgcugguugaaaaauggcaaagaauucaaaccugaccacagaauuggaggcuacaagguccguuaugccaccuggagcaucauaauggacucuguggugcccucugacaagggcaacuacaccugcauuguggagaaugaguacggcagcaucaaccacacauaccagcuggaugucguggagcgguccccucaccggcccauccugcaagcaggguugcccgccaacaaaacaguggcccuggguagcaacguggaguucauguguaagguguacagugacccgcagccgcacauccaguggcuaaagcacaucgaggugaaugggagcaagauuggcccagacaaccugccuuauguccagaucuugaagguaaucauggcaccagucuucgugggccagucuacugggaaggagaccacugucucgggggcucaaguuccugugggcaggcucaguugcccccgaaugggaucauuccucacgcuucaggcacacacacuccaucucaguagggaucuagccacaucccccaggacuaguaacagaggucacaaaguggaggugagcugggaacagagggcugcagggauggguggugcuggucuguaauaagcuuugagagcaacgucacuggggcuuuggggucagcuacacaaggaaggcauuuggaccccugccuuuucauugcccgaaaccagagccuuuccaccaagcguuucccagucuuagcccuguguccugaguuacguacgaucuuucuggcaaauggggugcaugauaagagcaucucuuacgaagaguuggaaaaacaaaugccauauauaaauucuaagccauaugaggacgaggaguaauggcauuuucuuccuuuuuccucucacucccagacauucauugucccugaaugcuccauuaauccagggaagguaauugccuaaaucuccaguggaucucgcaacaggaaggaaccagaagcugggaaaguuguuuaccucuuugucccagaguuagaccucauccuccccuagcuuagcugucucagagauauacuggcccucccuucucuucucuuugcugcuggugcuaaaacugcucuguaggucauuggccacugucuccacucacaaccccugcuccaguccuggagggaguggguuaaacacaaauagaacauuccauuugaagcagugauucuuuuuuuuuuuuuuuuuuuuuaaucaaaugcuuuggacuuuugaaguccacuuguucuguacuuguaaaagggaaagaaggccgggcgcaguggcucacgccuguaaucccagcacuuuagaucacuugaggucaggaguuugagaccagcccggccaacauggugaaaccccaucucuacuaaaaauacaaaaauuagcugugcauagugguuggcaccuguagucccagcuacucaggaggcugaggcaagcuaacugcuugaacccagaaggcagagguugcagugagcugagaucacgccacugcacuccagccugggugacagagugagugagacucugcguuaaaaaaaaaaaaaaaaaaaaaaa

SEQ ID NO: 160773 - RNA, 2801 nt, Homo sapiens
agaugcaggggcgcaaacgccaaaggagaccaggcuguaggaagagaagggcagagcgccggacagcucggcccgcuccccguccuuuggggccgcggcuggggaacuacaaggcccagcaggcagcugcagggggcggaggcggaggagggaccagcgcgggugggagugagagagcgagcccucgcgccccgccggcgcauagcgcucggagcgcucuugcggccacaggcgcggcguccucggcggcgggcggcagcuagcgggagccgggacgccggugcagccgcagcgcgcggaggaacccgggugugccgggagcugggcggccacguccggacgggaccgagaccccucguagcgcauugcggcgaccucgccuuccccggccgcgagcgcgccgcugcuugaaaagccgcggaacccaaggacuuuucuccgguccgagcucggggcgccccgcagggcgcacgguacccgugcugcagucgggcacgccgcggcgccggggccuccgcagggcgauggagcccggucugcaaggaaagugaggcgccgccgcugcguucuggaggaggggggcacaaggucuggagaccccggguggcggacgggagcccuccccccgccccgccuccggggcaccagcuccggcuccauuguucccgcccgggcuggaggcgccgagcaccgagcgccgccgggagucgagcgccggccgcggagcucuugcgaccccgccaggacccgaacagagcccgggggcggcgggccggagccggggacgcgggcacacgcccgcucgcacaagccacggcggacucucccgaggcggaaccuccacgccgagcgagggucaguuugaaaaggaggaucgagcucacuguggaguauccauggagauguggagccuugucaccaaccucuaacugcagaacugggauguggagcuggaagugccuccucuucugggcugugcuggucacagccacacucugcaccgcuaggccguccccgaccuugccugaacaagaugcucuccccuccucggaggaugaugaugaugaugaugacuccucuucagaggagaaagaaacagauaacaccaaaccaaaccccguagcuccauauuggacauccccagaaaagauggaaaagaaauugcaugcagugccggcugccaagacagugaaguucaaaugcccuuccagugggaccccaaaccccacacugcgcugguugaaaaauggcaaagaauucaaaccugaccacagaauuggaggcuacaagguccguuaugccaccuggagcaucauaauggacucuguggugcccucugacaagggcaacuacaccugcauuguggagaaugaguacggcagcaucaaccacacauaccagcuggaugucguggagcgguccccucaccggcccauccugcaagcaggguugcccgccaacaaaacaguggcccuggguagcaacguggaguucauguguaagguguacagugacccgcagccgcacauccaguggcuaaagcacaucgaggugaaugggagcaagauuggcccagacaaccugccuuauguccagaucuugaagguaaucauggcaccagucuucgugggccagucuacugggaaggagaccacugucucgggggcucaaguuccugugggcaggcucaguugcccccgaaugggaucauuccucacgcuucaggcacacacacuccaucucaguagggaucuagccacaucccccaggacuaguaacagaggucacaaaguggaggugagcugggaacagagggcugcagggauggguggugcuggucuguaauaagcuuugagagcaacgucacuggggcuuuggggucagcuacacaaggaaggcauuuggaccccugccuuuucauugcccgaaaccagagccuuuccaccaagcguuucccagucuuagcccuguguccugaguuacguacgaucuuucuggcaaauggggugcaugauaagagcaucucuuacgaagaguuggaaaaacaaaugccauauauaaauucuaagccauaugaggacgaggaguaauggcauuuucuuccuuuuuccucucacucccagacauucauugucccugaaugcuccauuaauccagggaagguaauugccuaaaucuccaguggaucucgcaacaggaaggaaccagaagcugggaaaguuguuuaccucuuugucccagaguuagaccucauccuccccuagcuuagcugucucagagauauacuggcccucccuucucuucucuuugcugcuggugcuaaaacugcucuguaggucauuggccacugucuccacucacaaccccugcuccaguccuggagggaguggguuaaacacaaauagaacauuccauuugaagcagugauucuuuuuuuuuuuuuuuuuuuuuaaucaaaugcuuuggacuuuugaaguccacuuguucuguacuuguaaaagggaaagaaggccgggcgcaguggcucacgccuguaaucccagcacuuuagaucacuugaggucaggaguuugagaccagcccggccaacauggugaaaccccaucucuacuaaaaauacaaaaauuagcugugcauagugguuggcaccuguagucccagcuacucaggaggcugaggcaagcuaacugcuugaacccagaaggcagagguugcagugagcugagaucacgccacugcacuccagccugggugacagagugagugagacucugcguuaaaaaaaaaaaaaaaaaaaaaaa

SEQ ID NO: 160774 - RNA, 5806 nt, Homo sapiens
agaugcaggggcgcaaacgccaaaggagaccaggcuguaggaagagaagggcagagcgccggacagcucggcccgcuccccguccuuuggggccgcggcuggggaacuacaaggcccagcaggcagcugcagggggcggaggcggaggagggaccagcgcgggugggagugagagagcgagcccucgcgccccgccggcgcauagcgcucggagcgcucuugcggccacaggcgcggcguccucggcggcgggcggcagcuagcgggagccgggacgccggugcagccgcagcgcgcggaggaacccgggugugccgggagcugggcggccacguccggacgggaccgagaccccucguagcgcauugcggcgaccucgccuuccccggccgcgagcgcgccgcugcuugaaaagccgcggaacccaaggacuuuucuccgguccgagcucggggcgccccgcagggcgcacgguacccgugcugcagucgggcacgccgcggcgccggggccuccgcagggcgauggagcccggucugcaaggaaagugaggcgccgccgcugcguucuggaggaggggggcacaaggucuggagaccccggguggcggacgggagcccuccccccgccccgccuccggggcaccagcuccggcuccauuguucccgcccgggcuggaggcgccgagcaccgagcgccgccgggagucgagcgccggccgcggagcucuugcgaccccgccaggacccgaacagagcccgggggcggcgggccggagccggggacgcgggcacacgcccgcucgcacaagccacggcggacucucccgaggcggaaccuccacgccgagcgagggucaguuugaaaaggaggaucgagcucacuguggaguauccauggagauguggagccuugucaccaaccucuaacugcagaacugggauguggagcuggaagugccuccucuucugggcugugcuggucacagccacacucugcaccgcuaggccguccccgaccuugccugaacaagcccagcccuggggagccccuguggaaguggaguccuuccugguccaccccggugaccugcugcagcuucgcugucggcugcgggacgaugugcagagcaucaacuggcugcgggacggggugcagcuggcggaaagcaaccgcacccgcaucacaggggaggagguggaggugcaggacuccgugcccgcagacuccggccucuaugcuugcguaaccagcagccccucgggcagugacaccaccuacuucuccgucaauguuucagaugcucuccccuccucggaggaugaugaugaugaugaugacuccucuucagaggagaaagaaacagauaacaccaaaccaaaccguaugcccguagcuccauauuggacauccccagaaaagauggaaaagaaauugcaugcagugccggcugccaagacagugaaguucaaaugcccuuccagugggaccccaaaccccacacugcgcugguugaaaaauggcaaagaauucaaaccugaccacagaauuggaggcuacaagguccguuaugccaccuggagcaucauaauggacucuguggugcccucugacaagggcaacuacaccugcauuguggagaaugaguacggcagcaucaaccacacauaccagcuggaugucguggagcgguccccucaccggcccauccugcaagcaggguugcccgccaacaaaacaguggcccuggguagcaacguggaguucauguguaagguguacagugacccgcagccgcacauccaguggcuaaagcacaucgaggugaaugggagcaagauuggcccagacaaccugccuuauguccagaucuugaagacugcuggaguuaauaccaccgacaaagagauggaggugcuucacuuaagaaaugucuccuuugaggacgcaggggaguauacgugcuuggcggguaacucuaucggacucucccaucacucugcaugguugaccguucuggaagcccuggaagagaggccggcagugaugaccucgccccuguaccuggagaucaucaucuauugcacaggggccuuccucaucuccugcaugguggggucggucaucgucuacaagaugaagagugguaccaagaagagugacuuccacagccagauggcugugcacaagcuggccaagagcaucccucugcgcagacagguaacagugucugcugacuccagugcauccaugaacucugggguucuucugguucggccaucacggcucuccuccagugggacucccaugcuagcaggggucucugaguaugagcuucccgaagacccucgcugggagcugccucgggacagacuggucuuaggcaaaccccugggagagggcugcuuugggcaggugguguuggcagaggcuaucgggcuggacaaggacaaacccaaccgugugaccaaaguggcugugaagauguugaagucggacgcaacagagaaagacuugucagaccugaucucagaaauggagaugaugaagaugaucgggaagcauaagaauaucaucaaccugcugggggccugcacgcaggauggucccuuguaugucaucguggaguaugccuccaagggcaaccugcgggaguaccugcaggcccggaggcccccagggcuggaauacugcuacaaccccagccacaacccagaggagcagcucuccuccaaggaccugguguccugcgccuaccagguggcccgaggcauggaguaucuggccuccaagaagugcauacaccgagaccuggcagccaggaauguccuggugacagaggacaaugugaugaagauagcagacuuuggccucgcacgggacauucaccacaucgacuacuauaaaaagacaaccaacggccgacugccugugaaguggauggcacccgaggcauuauuugaccggaucuacacccaccagagugauguguggucuuucggggugcuccugugggagaucuucacucugggcggcuccccauaccccggugugccuguggaggaacuuuucaagcagcugguggaagaccuggaccgcaucguggccuugaccuccaaccaggaguaccuggaccuguccaugccccuggaccaguacucccccagcuuucccgacacccggagcucuacgugcuccucaggggaggauuccgucuucucucaugagccgcugcccgaggagcccugccugccccgacacccagcccagcuugccaauggcggacucaaacgccgcugacugccacccacacgcccuccccagacuccaccgucagcuguaacccucacccacagccccugcugggcccaccaccuguccgucccuguccccuuuccugcuggcaggagccggcugccuaccaggggccuuccuguguggccugccuucaccccacucagcucaccucucccuccaccuccucuccaccugcuggugagaggugcaaagaggcagaucuuugcugccagccacuucauccccucccagauguuggaccaacaccccucccugccaccaggcacugccuggagggcagggagugggagccaaugaacaggcaugcaagugagagcuuccugagcuuucuccugucgguuuggucuguuuugccuucacccauaagccccucgcacucugguggcaggugccuuguccucagggcuacagcaguagggaggucagugcuucgugccucgauugaaggugaccucugccccagauagguggugccaguggcuuauuaauuccgauacuaguuugcuuugcugaccaaaugccugguaccagaggauggugaggcgaaggccagguugggggcaguguuguggcccuggggcccagccccaaacugggggcucuguauauagcuaugaagaaaacacaaaguguauaaaucugaguauauauuuacaugucuuuuuaaaagggucguuaccagagauuuacccaucggguaagaugcuccugguggcugggaggcaucaguugcuauauauuaaaaacaaaaaagaaaaaaaaggaaaauguuuuuaaaaaggucauauauuuuuugcuacuuuugcuguuuuauuuuuuuaaauuauguucuaaaccuauuuucaguuuaggucccucaauaaaaauugcugcugcuucauuuaucuaugggcuguaugaaaagggugggaauguccacuggaaagaagggacacccacgggcccuggggcuaggucugucccgagggcaccgcaugcucccggcgcagguuccuuguaaccucuucuuccuagguccugcacccagaccucacgacgcaccuccugccucuccgcugcuuuuggaaagucagaaaaagaagaugucugcuucgagggcaggaaccccauccaugcaguagaggcgcugggcagagagucaaggcccagcagccaucgaccauggaugguuuccuccaaggaaaccggugggguugggcuggggagggggcaccuaccuaggaauagccacgggguagagcuacagugauuaagaggaaagcaagggcgcgguugcucacgccuguaaucccagcacuuugggacaccgaggugggcagaucacuucaggucaggaguuugagaccagccuggccaacuuagugaaaccccaucucuacuaaaaaugcaaaaauuauccaggcaugguggcacacgccuguaaucccagcuccacaggaggcugaggcagaaucccuugaagcugggaggcggagguugcagugagccgagauugcgccauugcacuccagccugggcaacagagaaaacaaaaaggaaaacaaaugaugaaggucugcagaaacugaaacccagacaugugucugcccccucuaugugggcaugguuuugccagugcuucuaagugcaggagaacaugucaccugaggcuaguuuugcauucaggucccuggcuucguuucuuguugguaugccuccccagaucguccuuccuguauccaugugaccagacuguauuuguugggacugucgcagaucuuggcuucuuacaguucuuccuguccaaacuccauccugucccucaggaacggggggaaaauucuccgaauguuuuugguuuuuuggcugcuuggaauuuacuucugccaccugcuggucaucacuguccucacuaaguggauucuggcucccccguaccucauggcucaaacuaccacuccucagucgcuauauuaaagcuuauauuuugcuggauuacugcuaaauacaaaagaaaguucaauauguuuucauuucuguagggaaaaugggauugcugcuuuaaauuucugagcuagggauuuuuuggcagcugcaguguuggcgacuauuguaaaauucucuuuguuucucucuguaaauagcaccugcuaacauuacaauuuguauuuauguuuaaagaaggcaucauuuggugaacagaacuaggaaaugaauuuuuagcucuuaaaagcauuugcuuugagaccgcacaggagugucuuuccuuguaaaacagugaugauaauuucugccuuggcccuaccuugaagcaauguugugugaagggaugaagaaucuaaaagucuucauaaguccuugggagaggugcuagaaaaauauaaggcacuaucauaauuacagugauguccuugcuguuacuacucaaaucacccacaaauuuccccaaagacugcgcuagcugucaaauaaaagacagugaaauugaccugaaaaaaaaaaaaaaaaa

SEQ ID NO: 160775 - RNA, 5917 nt, Homo sapiens
agaugcaggggcgcaaacgccaaaggagaccaggcuguaggaagagaagggcagagcgccggacagcucggcccgcuccccguccuuuggggccgcggcuggggaacuacaaggcccagcaggcagcugcagggggcggaggcggaggagggaccagcgcgggugggagugagagagcgagcccucgcgccccgccggcgcauagcgcucggagcgcucuugcggccacaggcgcggcguccucggcggcgggcggcagcuagcgggagccgggacgccggugcagccgcagcgcgcggaggaacccgggugugccgggagcugggcggccacguccggacgggaccgagaccccucguagcgcauugcggcgaccucgccuuccccggccgcgagcgcgccgcugcuugaaaagccgcggaacccaaggacuuuucuccgguccgagcucggggcgccccgcagggcgcacgguacccgugcugcagucgggcacgccgcggcgccggggccuccgcagggcgauggagcccggucugcaaggaaagugaggcgccgccgcugcguucuggaggaggggggcacaaggucuggagaccccggguggcggacgggagcccuccccccgccccgccuccggggcaccagcuccggcuccauuguucccgcccgggcuggaggcgccgagcaccgagcgccgccgggagucgagcgccggccgcggagcucuugcgaccccgccaggacccgaacagagcccgggggcggcgggccggagccggggacgcgggcacacgcccgcucgcacaagccacggcggacucucccgaggcggaaccuccacgccgagcgagggucaguuugaaaaggaggaucgagcucacuguggaguauccauggagauguggagccuugucaccaaccucuaacugcagaacugggauguggagcuggaagugccuccucuucugggcugugcuggucacagccacacucugcaccgcuaggccguccccgaccuugccugaacaagcccagcccuggggagccccuguggaaguggaguccuuccugguccaccccggugaccugcugcagcuucgcugucggcugcgggacgaugugcagagcaucaacuggcugcgggacggggugcagcuggcggaaagcaaccgcacccgcaucacaggggaggagguggaggugcaggacuccgugcccgcagacuccggccucuaugcuugcguaaccagcagccccucgggcagugacaccaccuacuucuccgucaauguuucagaugcucuccccuccucggaggaugaugaugaugaugaugacuccucuucagaggagaaagaaacagauaacaccaaaccaaaccguaugcccguagcuccauauuggacauccccagaaaagauggaaaagaaauugcaugcagugccggcugccaagacagugaaguucaaaugcccuuccagugggaccccaaaccccacacugcgcugguugaaaaauggcaaagaauucaaaccugaccacagaauuggaggcuacaagguccguuaugccaccuggagcaucauaauggacucuguggugcccucugacaagggcaacuacaccugcauuguggagaaugaguacggcagcaucaaccacacauaccagcuggaugucguggagcgguccccucaccggcccauccugcaagcaggguugcccgccaacaaaacaguggcccuggguagcaacguggaguucauguguaagguguacagugacccgcagccgcacauccaguggcuaaagcacaucgaggugaaugggagcaagauuggcccagacaaccugccuuauguccagaucuugaagacugcuggaguuaauaccaccgacaaagagauggaggugcuucacuuaagaaaugucuccuuugaggacgcaggggaguauacgugcuuggcggguaacucuaucggacucucccaucacucugcaugguugaccguucuggaagcccuggaagagaggccggcagugaugaccucgccccuguaccuggagaucaucaucuauugcacaggggccuuccucaucuccugcaugguggggucggucaucgucuacaagaugaagagugguaccaagaagagugacuuccacagccagauggcugugcacaagcuggccaagagcaucccucugcgcagacagguaacagugucugcugacuccagugcauccaugaacucugggguucuucugguucggccaucacggcucuccuccagugggacucccaugcuagcaggggucucugaguaugagcuucccgaagacccucgcugggagcugccucgggacagacuggucuuaggcaaaccccugggagagggcugcuuugggcaggugguguuggcagaggcuaucgggcuggacaaggacaaacccaaccgugugaccaaaguggcugugaagauguugaagucggacgcaacagagaaagacuugucagaccugaucucagaaauggagaugaugaagaugaucgggaagcauaagaauaucaucaaccugcugggggccugcacgcaggauggucccuuguaugucaucguggaguaugccuccaagggcaaccugcgggaguaccugcaggcccggaggcccccagggcuggaauacugcuacaaccccagccacaacccagaggagcagcucuccuccaaggaccugguguccugcgccuaccagguggcccgaggcauggaguaucuggccuccaagaagugcauacaccgagaccuggcagccaggaauguccuggugacagaggacaaugugaugaagauagcagacuuuggccucgcacgggacauucaccacaucgacuacuauaaaaagacaaccaacggccgacugccugugaaguggauggcacccgaggcauuauuugaccggaucuacacccaccagagugauguguggucuuucggggugcuccugugggagaucuucacucugggcggcuccccauaccccggugugccuguggaggaacuuuucaagcugcugaaggagggucaccgcauggacaagcccaguaacugcaccaacgagcuguacaugaugaugcgggacugcuggcaugcagugcccucacagagacccaccuucaagcagcugguggaagaccuggaccgcaucguggccuugaccuccaaccaggaguaccuggaccuguccaugccccuggaccaguacucccccagcuuucccgacacccggagcucuacgugcuccucaggggaggauuccgucuucucucaugagccgcugcccgaggagcccugccugccccgacacccagcccagcuugccaauggcggacucaaacgccgcugacugccacccacacgcccuccccagacuccaccgucagcuguaacccucacccacagccccugcugggcccaccaccuguccgucccuguccccuuuccugcuggcaggagccggcugccuaccaggggccuuccuguguggccugccuucaccccacucagcucaccucucccuccaccuccucuccaccugcuggugagaggugcaaagaggcagaucuuugcugccagccacuucauccccucccagauguuggaccaacaccccucccugccaccaggcacugccuggagggcagggagugggagccaaugaacaggcaugcaagugagagcuuccugagcuuucuccugucgguuuggucuguuuugccuucacccauaagccccucgcacucugguggcaggugccuuguccucagggcuacagcaguagggaggucagugcuucgugccucgauugaaggugaccucugccccagauagguggugccaguggcuuauuaauuccgauacuaguuugcuuugcugaccaaaugccugguaccagaggauggugaggcgaaggccagguugggggcaguguuguggcccuggggcccagccccaaacugggggcucuguauauagcuaugaagaaaacacaaaguguauaaaucugaguauauauuuacaugucuuuuuaaaagggucguuaccagagauuuacccaucggguaagaugcuccugguggcugggaggcaucaguugcuauauauuaaaaacaaaaaagaaaaaaaaggaaaauguuuuuaaaaaggucauauauuuuuugcuacuuuugcuguuuuauuuuuuuaaauuauguucuaaaccuauuuucaguuuaggucccucaauaaaaauugcugcugcuucauuuaucuaugggcuguaugaaaagggugggaauguccacuggaaagaagggacacccacgggcccuggggcuaggucugucccgagggcaccgcaugcucccggcgcagguuccuuguaaccucuucuuccuagguccugcacccagaccucacgacgcaccuccugccucuccgcugcuuuuggaaagucagaaaaagaagaugucugcuucgagggcaggaaccccauccaugcaguagaggcgcugggcagagagucaaggcccagcagccaucgaccauggaugguuuccuccaaggaaaccggugggguugggcuggggagggggcaccuaccuaggaauagccacgggguagagcuacagugauuaagaggaaagcaagggcgcgguugcucacgccuguaaucccagcacuuugggacaccgaggugggcagaucacuucaggucaggaguuugagaccagccuggccaacuuagugaaaccccaucucuacuaaaaaugcaaaaauuauccaggcaugguggcacacgccuguaaucccagcuccacaggaggcugaggcagaaucccuugaagcugggaggcggagguugcagugagccgagauugcgccauugcacuccagccugggcaacagagaaaacaaaaaggaaaacaaaugaugaaggucugcagaaacugaaacccagacaugugucugcccccucuaugugggcaugguuuugccagugcuucuaagugcaggagaacaugucaccugaggcuaguuuugcauucaggucccuggcuucguuucuuguugguaugccuccccagaucguccuuccuguauccaugugaccagacuguauuuguugggacugucgcagaucuuggcuucuuacaguucuuccuguccaaacuccauccugucccucaggaacggggggaaaauucuccgaauguuuuugguuuuuuggcugcuuggaauuuacuucugccaccugcuggucaucacuguccucacuaaguggauucuggcucccccguaccucauggcucaaacuaccacuccucagucgcuauauuaaagcuuauauuuugcuggauuacugcuaaauacaaaagaaaguucaauauguuuucauuucuguagggaaaaugggauugcugcuuuaaauuucugagcuagggauuuuuuggcagcugcaguguuggcgacuauuguaaaauucucuuuguuucucucuguaaauagcaccugcuaacauuacaauuuguauuuauguuuaaagaaggcaucauuuggugaacagaacuaggaaaugaauuuuuagcucuuaaaagcauuugcuuugagaccgcacaggagugucuuuccuuguaaaacagugaugauaauuucugccuuggcccuaccuugaagcaauguugugugaagggaugaagaaucuaaaagucuucauaaguccuugggagaggugcuagaaaaauauaaggcacuaucauaauuacagugauguccuugcuguuacuacucaaaucacccacaaauuuccccaaagacugcgcuagcugucaaauaaaagacagugaaauugaccugaaaaaaaaaaaaaaaaa

SEQ ID NO: 160776 - RNA, 19 nt, Artificial Sequence
  Description of Artificial Sequence: Synthetic oligonucleotide
agaugcaggggcgcaaacg

SEQ ID NO: 160777 - RNA, 19 nt, Artificial Sequence
  Description of Artificial Sequence: Synthetic oligonucleotide
gccaaaggagaccaggcug

SEQ ID NO: 160778 - RNA, 19 nt, Artificial Sequence
  Description of Artificial Sequence: Synthetic oligonucleotide
guaggaagagaagggcaga

SEQ ID NO: 160779 - RNA, 19 nt, Artificial Sequence
  Description of Artificial Sequence: Synthetic oligonucleotide
agcgccggacagcucggcc

SEQ ID NO: 160780 - RNA, 19 nt, Artificial Sequence
  Description of Artificial Sequence: Synthetic oligonucleotide
ccgcuccccguccuuuggg

SEQ ID NO: 160781 - RNA, 19 nt, Artificial Sequence
  Description of Artificial Sequence: Synthetic oligonucleotide
ggccgcggcuggggaacua

SEQ ID NO: 160782 - RNA, 19 nt, Artificial Sequence
  Description of Artificial Sequence: Synthetic oligonucleotide
acaaggcccagcaggcagc

SEQ ID NO: 160783 - RNA, 19 nt, Artificial Sequence
  Description of Artificial Sequence: Synthetic oligonucleotide
cugcagggggcggaggcgg

SEQ ID NO: 160784 - RNA, 19 nt, Artificial Sequence
  Description of Artificial Sequence: Synthetic oligonucleotide
gaggagggaccagcgcggg

SEQ ID NO: 160785 - RNA, 19 nt, Artificial Sequence
  Description of Artificial Sequence: Synthetic oligonucleotide
gugggagugagagagcgag

SEQ ID NO: 160786 - RNA, 19 nt, Artificial Sequence
  Description of Artificial Sequence: Synthetic oligonucleotide
gcccucgcgccccgccggc

SEQ ID NO: 160787 - RNA, 19 nt, Artificial Sequence
  Description of Artificial Sequence: Synthetic oligonucleotide
cgcauagcgcucggagcgc

SEQ ID NO: 160788 - RNA, 19 nt, Artificial Sequence
  Description of Artificial Sequence: Synthetic oligonucleotide
cucuugcggccacaggcgc

SEQ ID NO: 160789 - RNA, 19 nt, Artificial Sequence
  Description of Artificial Sequence: Synthetic oligonucleotide
cggcguccucggcggcggg

SEQ ID NO: 160790 - RNA, 19 nt, Artificial Sequence
  Description of Artificial Sequence: Synthetic oligonucleotide
gcggcagcuagcgggagcc

SEQ ID NO: 160791 - RNA, 19 nt, Artificial Sequence
  Description of Artificial Sequence: Synthetic oligonucleotide
cgggacgccggugcagccg

SEQ ID NO: 160792 - RNA, 19 nt, Artificial Sequence
  Description of Artificial Sequence: Synthetic oligonucleotide
gcagcgcgcggaggaaccc

SEQ ID NO: 160793 - RNA, 19 nt, Artificial Sequence
  Description of Artificial Sequence: Synthetic oligonucleotide
cgggugugccgggagcugg

SEQ ID NO: 160794 - RNA, 19 nt, Artificial Sequence
  Description of Artificial Sequence: Synthetic oligonucleotide
ggcggccacguccggacgg

SEQ ID NO: 160795 - RNA, 19 nt, Artificial Sequence
  Description of Artificial Sequence: Synthetic oligonucleotide
ggaccgagaccccucguag

SEQ ID NO: 160796 - RNA, 19 nt, Artificial Sequence
  Description of Artificial Sequence: Synthetic oligonucleotide
gcgcauugcggcgaccucg

SEQ ID NO: 160797 - RNA, 19 nt, Artificial Sequence
  Description of Artificial Sequence: Synthetic oligonucleotide
gccuuccccggccgcgagc

SEQ ID NO: 160798 - RNA, 19 nt, Artificial Sequence
  Description of Artificial Sequence: Synthetic oligonucleotide
cgcgccgcugcuugaaaag

SEQ ID NO: 160799 - RNA, 19 nt, Artificial Sequence
  Description of Artificial Sequence: Synthetic oligonucleotide
gccgcggaacccaaggacu

SEQ ID NO: 160800 - RNA, 19 nt, Artificial Sequence
  Description of Artificial Sequence: Synthetic oligonucleotide
uuuucuccgguccgagcuc

SEQ ID NO: 160801 - RNA, 19 nt, Artificial Sequence
  Description of Artificial Sequence: Synthetic oligonucleotide
cggggcgccccgcagggcg

SEQ ID NO: 160802 - RNA, 19 nt, Artificial Sequence
  Description of Artificial Sequence: Synthetic oligonucleotide
gcacgguacccgugcugca

SEQ ID NO: 160803 - RNA, 19 nt, Artificial Sequence
  Description of Artificial Sequence: Synthetic oligonucleotide
agucgggcacgccgcggcg

SEQ ID NO: 160804 - RNA, 19 nt, Artificial Sequence
  Description of Artificial Sequence: Synthetic oligonucleotide
gccggggccuccgcagggc

SEQ ID NO: 160805 - RNA, 19 nt, Artificial Sequence
  Description of Artificial Sequence: Synthetic oligonucleotide
cgauggagcccggucugca

SEQ ID NO: 160806 - RNA, 19 nt, Artificial Sequence
  Description of Artificial Sequence: Synthetic oligonucleotide
aaggaaagugaggcgccgc

SEQ ID NO: 160807 - RNA, 19 nt, Artificial Sequence
  Description of Artificial Sequence: Synthetic oligonucleotide
ccgcugcguucuggaggag

SEQ ID NO: 160808 - RNA, 19 nt, Artificial Sequence
  Description of Artificial Sequence: Synthetic oligonucleotide
ggggggcacaaggucugga

SEQ ID NO: 160809 - RNA, 19 nt, Artificial Sequence
  Description of Artificial Sequence: Synthetic oligonucleotide
agaccccggguggcggacg

SEQ ID NO: 160810 - RNA, 19 nt, Artificial Sequence
  Description of Artificial Sequence: Synthetic oligonucleotide
gggagcccuccccccgccc

SEQ ID NO: 160811 - RNA, 19 nt, Artificial Sequence
  Description of Artificial Sequence: Synthetic oligonucleotide
ccgccuccggggcaccagc

SEQ ID NO: 160812 - RNA, 19 nt, Artificial Sequence
  Description of Artificial Sequence: Synthetic oligonucleotide
cuccggcuccauuguuccc

SEQ ID NO: 160813 - RNA, 19 nt, Artificial Sequence
  Description of Artificial Sequence: Synthetic oligonucleotide
cgcccgggcuggaggcgcc

SEQ ID NO: 160814 - RNA, 19 nt, Artificial Sequence
  Description of Artificial Sequence: Synthetic oligonucleotide
cgagcaccgagcgccgccg

SEQ ID NO: 160815 - RNA, 19 nt, Artificial Sequence
  Description of Artificial Sequence: Synthetic oligonucleotide
gggagucgagcgccggccg

SEQ ID NO: 160816 - RNA, 19 nt, Artificial Sequence
  Description of Artificial Sequence: Synthetic oligonucleotide
gcggagcucuugcgacccc

SEQ ID NO: 160817 - RNA, 19 nt, Artificial Sequence
  Description of Artificial Sequence: Synthetic oligonucleotide
cgccaggacccgaacagag

SEQ ID NO: 160818 - RNA, 19 nt, Artificial Sequence
  Description of Artificial Sequence: Synthetic oligonucleotide
gcccgggggcggcgggccg

SEQ ID NO: 160819 - RNA, 19 nt, Artificial Sequence
  Description of Artificial Sequence: Synthetic oligonucleotide
ggagccggggacgcgggca

SEQ ID NO: 160820 - RNA, 19 nt, Artificial Sequence
  Description of Artificial Sequence: Synthetic oligonucleotide
acacgcccgcucgcacaag

SEQ ID NO: 160821 - RNA, 19 nt, Artificial Sequence
  Description of Artificial Sequence: Synthetic oligonucleotide
gccacggcggacucucccg

SEQ ID NO: 160822 - RNA, 19 nt, Artificial Sequence
  Description of Artificial Sequence: Synthetic oligonucleotide
gaggcggaaccuccacgcc

SEQ ID NO: 160823 - RNA, 19 nt, Artificial Sequence
  Description of Artificial Sequence: Synthetic oligonucleotide
cgagcgagggucaguuuga

SEQ ID NO: 160824 - RNA, 19 nt, Artificial Sequence
  Description of Artificial Sequence: Synthetic oligonucleotide
aaaaggaggaucgagcuca

SEQ ID NO: 160825 - RNA, 19 nt, Artificial Sequence
  Description of Artificial Sequence: Synthetic oligonucleotide
acuguggaguauccaugga

SEQ ID NO: 160826 - RNA, 19 nt, Artificial Sequence
  Description of Artificial Sequence: Synthetic oligonucleotide
agauguggagccuugucac

SEQ ID NO: 160827 - RNA, 19 nt, Artificial Sequence
  Description of Artificial Sequence: Synthetic oligonucleotide
ccaaccucuaacugcagaa

SEQ ID NO: 160828 - RNA, 19 nt, Artificial Sequence
  Description of Artificial Sequence: Synthetic oligonucleotide
acugggauguggagcugga

SEQ ID NO: 160829 - RNA, 19 nt, Artificial Sequence
  Description of Artificial Sequence: Synthetic oligonucleotide
aagugccuccucuucuggg

SEQ ID NO: 160830 - RNA, 19 nt, Artificial Sequence
  Description of Artificial Sequence: Synthetic oligonucleotide
gcugugcuggucacagcca

SEQ ID NO: 160831 - RNA, 19 nt, Artificial Sequence
  Description of Artificial Sequence: Synthetic oligonucleotide
acacucugcaccgcuaggc

SEQ ID NO: 160832 - RNA, 19 nt, Artificial Sequence
  Description of Artificial Sequence: Synthetic oligonucleotide
ccguccccgaccuugccug

SEQ ID NO: 160833 - RNA, 19 nt, Artificial Sequence
  Description of Artificial Sequence: Synthetic oligonucleotide
gaacaagaugcucuccccu

SEQ ID NO: 160834 - RNA, 19 nt, Artificial Sequence
  Description of Artificial Sequence: Synthetic oligonucleotide
uccucggaggaugaugaug

SEQ ID NO: 160835 - RNA, 19 nt, Artificial Sequence
  Description of Artificial Sequence: Synthetic oligonucleotide
gaugaugaugacuccucuu

SEQ ID NO: 160836 - RNA, 19 nt, Artificial Sequence
  Description of Artificial Sequence: Synthetic oligonucleotide
ucagaggagaaagaaacag

SEQ ID NO: 160837 - RNA, 19 nt, Artificial Sequence
  Description of Artificial Sequence: Synthetic oligonucleotide
gauaacaccaaaccaaacc

SEQ ID NO: 160838 - RNA, 19 nt, Artificial Sequence
  Description of Artificial Sequence: Synthetic oligonucleotide
cccguagcuccauauugga

SEQ ID NO: 160839 - RNA, 19 nt, Artificial Sequence
  Description of Artificial Sequence: Synthetic oligonucleotide
acauccccagaaaagaugg

SEQ ID NO: 160840 - RNA, 19 nt, Artificial Sequence
  Description of Artificial Sequence: Synthetic oligonucleotide
gaaaagaaauugcaugcag

SEQ ID NO: 160841 - RNA, 19 nt, Artificial Sequence
  Description of Artificial Sequence: Synthetic oligonucleotide
gugccggcugccaagacag

SEQ ID NO: 160842 - RNA, 19 nt, Artificial Sequence
  Description of Artificial Sequence: Synthetic oligonucleotide
gugaaguucaaaugcccuu

SEQ ID NO: 160843 - RNA, 19 nt, Artificial Sequence
  Description of Artificial Sequence: Synthetic oligonucleotide
uccagugggaccccaaacc

SEQ ID NO: 160844 - RNA, 19 nt, Artificial Sequence
  Description of Artificial Sequence: Synthetic oligonucleotide
cccacacugcgcugguuga

SEQ ID NO: 160845 - RNA, 19 nt, Artificial Sequence
  Description of Artificial Sequence: Synthetic oligonucleotide
aaaaauggcaaagaauuca

SEQ ID NO: 160846 - RNA, 19 nt, Artificial Sequence
  Description of Artificial Sequence: Synthetic oligonucleotide
aaaccugaccacagaauug

SEQ ID NO: 160847 - RNA, 19 nt, Artificial Sequence
  Description of Artificial Sequence: Synthetic oligonucleotide
ggaggcuacaagguccguu

SEQ ID NO: 160848 - RNA, 19 nt, Artificial Sequence
  Description of Artificial Sequence: Synthetic oligonucleotide
uaugccaccuggagcauca

SEQ ID NO: 160849 - RNA, 19 nt, Artificial Sequence
  Description of Artificial Sequence: Synthetic oligonucleotide
auaauggacucuguggugc

SEQ ID NO: 160850 - RNA, 19 nt, Artificial Sequence
  Description of Artificial Sequence: Synthetic oligonucleotide
cccucugacaagggcaacu

SEQ ID NO: 160851 - RNA, 19 nt, Artificial Sequence
  Description of Artificial Sequence: Synthetic oligonucleotide
uacaccugcauuguggaga

SEQ ID NO: 160852 - RNA, 19 nt, Artificial Sequence
  Description of Artificial Sequence: Synthetic oligonucleotide
aaugaguacggcagcauca

SEQ ID NO: 160853 - RNA, 19 nt, Artificial Sequence
  Description of Artificial Sequence: Synthetic oligonucleotide
aaccacacauaccagcugg

SEQ ID NO: 160854 - RNA, 19 nt, Artificial Sequence
  Description of Artificial Sequence: Synthetic oligonucleotide
gaugucguggagcgguccc

SEQ ID NO: 160855 - RNA, 19 nt, Artificial Sequence
  Description of Artificial Sequence: Synthetic oligonucleotide
ccucaccggcccauccugc

SEQ ID NO: 160856 - RNA, 19 nt, Artificial Sequence
  Description of Artificial Sequence: Synthetic oligonucleotide
caagcaggguugcccgcca

SEQ ID NO: 160857 - RNA, 19 nt, Artificial Sequence
  Description of Artificial Sequence: Synthetic oligonucleotide
aacaaaacaguggcccugg

SEQ ID NO: 160858 - RNA, 19 nt, Artificial Sequence
  Description of Artificial Sequence: Synthetic oligonucleotide
gguagcaacguggaguuca

SEQ ID NO: 160859 - RNA, 19 nt, Artificial Sequence
  Description of Artificial Sequence: Synthetic oligonucleotide
auguguaagguguacagug

SEQ ID NO: 160860 - RNA, 19 nt, Artificial Sequence
  Description of Artificial Sequence: Synthetic oligonucleotide
gacccgcagccgcacaucc

SEQ ID NO: 160861 - RNA, 19 nt, Artificial Sequence
  Description of Artificial Sequence: Synthetic oligonucleotide
caguggcuaaagcacaucg

SEQ ID NO: 160862 - RNA, 19 nt, Artificial Sequence
  Description of Artificial Sequence: Synthetic oligonucleotide
gaggugaaugggagcaaga

SEQ ID NO: 160863 - RNA, 19 nt, Artificial Sequence
  Description of Artificial Sequence: Synthetic oligonucleotide
auuggcccagacaaccugc

SEQ ID NO: 160864 - RNA, 19 nt, Artificial Sequence
  Description of Artificial Sequence: Synthetic oligonucleotide
ccuuauguccagaucuuga

SEQ ID NO: 160865 - RNA, 19 nt, Artificial Sequence
  Description of Artificial Sequence: Synthetic oligonucleotide
aagacugcuggaguuaaua

SEQ ID NO: 160866 - RNA, 19 nt, Artificial Sequence
  Description of Artificial Sequence: Synthetic oligonucleotide
accaccgacaaagagaugg

SEQ ID NO: 160867 - RNA, 19 nt, Artificial Sequence
  Description of Artificial Sequence: Synthetic oligonucleotide
gaggugcuucacuuaagaa

SEQ ID NO: 160868 - RNA, 19 nt, Artificial Sequence
  Description of Artificial Sequence: Synthetic oligonucleotide
aaugucuccuuugaggacg

SEQ ID NO: 160869 - RNA, 19 nt, Artificial Sequence
  Description of Artificial Sequence: Synthetic oligonucleotide
gcaggggaguauacgugcu

SEQ ID NO: 160870 - RNA, 19 nt, Artificial Sequence
  Description of Artificial Sequence: Synthetic oligonucleotide
uuggcggguaacucuaucg

SEQ ID NO: 160871 - RNA, 19 nt, Artificial Sequence
  Description of Artificial Sequence: Synthetic oligonucleotide
ggacucucccaucacucug

SEQ ID NO: 160872 - RNA, 19 nt, Artificial Sequence
  Description of Artificial Sequence: Synthetic oligonucleotide
gcaugguugaccguucugg

SEQ ID NO: 160873 - RNA, 19 nt, Artificial Sequence
  Description of Artificial Sequence: Synthetic oligonucleotide
gaagcccuggaagagaggc

SEQ ID NO: 160874 - RNA, 19 nt, Artificial Sequence
  Description of Artificial Sequence: Synthetic oligonucleotide
ccggcagugaugaccucgc

SEQ ID NO: 160875 - RNA, 19 nt, Artificial Sequence
  Description of Artificial Sequence: Synthetic oligonucleotide
ccccuguaccuggagauca

SEQ ID NO: 160876 - RNA, 19 nt, Artificial Sequence
  Description of Artificial Sequence: Synthetic oligonucleotide
aucaucuauugcacagggg

SEQ ID NO: 160877 - RNA, 19 nt, Artificial Sequence
  Description of Artificial Sequence: Synthetic oligonucleotide
gccuuccucaucuccugca

SEQ ID NO: 160878 - RNA, 19 nt, Artificial Sequence
  Description of Artificial Sequence: Synthetic oligonucleotide
augguggggucggucaucg

SEQ ID NO: 160879 - RNA, 19 nt, Artificial Sequence
  Description of Artificial Sequence: Synthetic oligonucleotide
gucuacaagaugaagagug

SEQ ID NO: 160880 - RNA, 19 nt, Artificial Sequence
  Description of Artificial Sequence: Synthetic oligonucleotide
gguaccaagaagagugacu

SEQ ID NO: 160881 - RNA, 19 nt, Artificial Sequence
  Description of Artificial Sequence: Synthetic oligonucleotide
uuccacagccagauggcug

SEQ ID NO: 160882 - RNA, 19 nt, Artificial Sequence
  Description of Artificial Sequence: Synthetic oligonucleotide
gugcacaagcuggccaaga

SEQ ID NO: 160883 - RNA, 19 nt, Artificial Sequence
  Description of Artificial Sequence: Synthetic oligonucleotide
agcaucccucugcgcagac

SEQ ID NO: 160884 - RNA, 19 nt, Artificial Sequence
  Description of Artificial Sequence: Synthetic oligonucleotide
cagguaacagugucugcug

SEQ ID NO: 160885 - RNA, 19 nt, Artificial Sequence
  Description of Artificial Sequence: Synthetic oligonucleotide
gacuccagugcauccauga

SEQ ID NO: 160886 - RNA, 19 nt, Artificial Sequence
  Description of Artificial Sequence: Synthetic oligonucleotide
aacucugggguucuucugg

SEQ ID NO: 160887 - RNA, 19 nt, Artificial Sequence
  Description of Artificial Sequence: Synthetic oligonucleotide
guucggccaucacggcucu

SEQ ID NO: 160888 - RNA, 19 nt, Artificial Sequence
  Description of Artificial Sequence: Synthetic oligonucleotide
uccuccagugggacuccca

SEQ ID NO: 160889 - RNA, 19 nt, Artificial Sequence
  Description of Artificial Sequence: Synthetic oligonucleotide
augcuagcaggggucucug

SEQ ID NO: 160890 - RNA, 19 nt, Artificial Sequence
  Description of Artificial Sequence: Synthetic oligonucleotide
gaguaugagcuucccgaag

SEQ ID NO: 160891 - RNA, 19 nt, Artificial Sequence
  Description of Artificial Sequence: Synthetic oligonucleotide
gacccucgcugggagcugc

SEQ ID NO: 160892 - RNA, 19 nt, Artificial Sequence
  Description of Artificial Sequence: Synthetic oligonucleotide
ccucgggacagacuggucu

SEQ ID NO: 160893 - RNA, 19 nt, Artificial Sequence
  Description of Artificial Sequence: Synthetic oligonucleotide
uuaggcaaaccccugggag

SEQ ID NO: 160894 - RNA, 19 nt, Artificial Sequence
  Description of Artificial Sequence: Synthetic oligonucleotide
gagggcugcuuugggcagg

SEQ ID NO: 160895 - RNA, 19 nt, Artificial Sequence
  Description of Artificial Sequence: Synthetic oligonucleotide
gugguguuggcagaggcua

SEQ ID NO: 160896 - RNA, 19 nt, Artificial Sequence
  Description of Artificial Sequence: Synthetic oligonucleotide
aucgggcuggacaaggaca

SEQ ID NO: 160897 - RNA, 19 nt, Artificial Sequence
  Description of Artificial Sequence: Synthetic oligonucleotide
aaacccaaccgugugacca

SEQ ID NO: 160898 - RNA, 19 nt, Artificial Sequence
  Description of Artificial Sequence: Synthetic oligonucleotide
aaaguggcugugaagaugu

SEQ ID NO: 160899 - RNA, 19 nt, Artificial Sequence
  Description of Artificial Sequence: Synthetic oligonucleotide
uugaagucggacgcaacag

SEQ ID NO: 160900 - RNA, 19 nt, Artificial Sequence
  Description of Artificial Sequence: Synthetic oligonucleotide
gagaaagacuugucagacc

SEQ ID NO: 160901 - RNA, 19 nt, Artificial Sequence
  Description of Artificial Sequence: Synthetic oligonucleotide
cugaucucagaaauggaga

SEQ ID NO: 160902 - RNA, 19 nt, Artificial Sequence
  Description of Artificial Sequence: Synthetic oligonucleotide
augaugaagaugaucggga

SEQ ID NO: 160903 - RNA, 19 nt, Artificial Sequence
  Description of Artificial Sequence: Synthetic oligonucleotide
aagcauaagaauaucauca

SEQ ID NO: 160904 - RNA, 19 nt, Artificial Sequence
  Description of Artificial Sequence: Synthetic oligonucleotide
aaccugcugggggccugca

SEQ ID NO: 160905 - RNA, 19 nt, Artificial Sequence
  Description of Artificial Sequence: Synthetic oligonucleotide
acgcaggauggucccuugu

SEQ ID NO: 160906 - RNA, 19 nt, Artificial Sequence
  Description of Artificial Sequence: Synthetic oligonucleotide
uaugucaucguggaguaug

SEQ ID NO: 160907 - RNA, 19 nt, Artificial Sequence
  Description of Artificial Sequence: Synthetic oligonucleotide
gccuccaagggcaaccugc

SEQ ID NO: 160908 - RNA, 19 nt, Artificial Sequence
  Description of Artificial Sequence: Synthetic oligonucleotide
cgggaguaccugcaggccc

SEQ ID NO: 160909 - RNA, 19 nt, Artificial Sequence
  Description of Artificial Sequence: Synthetic oligonucleotide
cggaggcccccagggcugg

SEQ ID NO: 160910 - RNA, 19 nt, Artificial Sequence
  Description of Artificial Sequence: Synthetic oligonucleotide
gaauacugcuacaacccca

SEQ ID NO: 160911 - RNA, 19 nt, Artificial Sequence
  Description of Artificial Sequence: Synthetic oligonucleotide
agccacaacccagaggagc

SEQ ID NO: 160912 - RNA, 19 nt, Artificial Sequence
  Description of Artificial Sequence: Synthetic oligonucleotide
cagcucuccuccaaggacc

SEQ ID NO: 160913 - RNA, 19 nt, Artificial Sequence
  Description of Artificial Sequence: Synthetic oligonucleotide
cugguguccugcgccuacc

SEQ ID NO: 160914 - RNA, 19 nt, Artificial Sequence
  Description of Artificial Sequence: Synthetic oligonucleotide
cagguggcccgaggcaugg

SEQ ID NO: 160915 - RNA, 19 nt, Artificial Sequence
  Description of Artificial Sequence: Synthetic oligonucleotide
gaguaucuggccuccaaga

SEQ ID NO: 160916 - RNA, 19 nt, Artificial Sequence
  Description of Artificial Sequence: Synthetic oligonucleotide
aagugcauacaccgagacc

SEQ ID NO: 160917 - RNA, 19 nt, Artificial Sequence
  Description of Artificial Sequence: Synthetic oligonucleotide
cuggcagccaggaaugucc

SEQ ID NO: 160918 - RNA, 19 nt, Artificial Sequence
  Description of Artificial Sequence: Synthetic oligonucleotide
cuggugacagaggacaaug

SEQ ID NO: 160919 - RNA, 19 nt, Artificial Sequence
  Description of Artificial Sequence: Synthetic oligonucleotide
gugaugaagauagcagacu

SEQ ID NO: 160920 - RNA, 19 nt, Artificial Sequence
  Description of Artificial Sequence: Synthetic oligonucleotide
uuuggccucgcacgggaca

SEQ ID NO: 160921 - RNA, 19 nt, Artificial Sequence
  Description of Artificial Sequence: Synthetic oligonucleotide
auucaccacaucgacuacu

SEQ ID NO: 160922 - RNA, 19 nt, Artificial Sequence
  Description of Artificial Sequence: Synthetic oligonucleotide
uauaaaaagacaaccaacg

SEQ ID NO: 160923 - RNA, 19 nt, Artificial Sequence
  Description of Artificial Sequence: Synthetic oligonucleotide
ggccgacugccugugaagu

SEQ ID NO: 160924 - RNA, 19 nt, Artificial Sequence
  Description of Artificial Sequence: Synthetic oligonucleotide
uggauggcacccgaggcau

SEQ ID NO: 160925 - RNA, 19 nt, Artificial Sequence
  Description of Artificial Sequence: Synthetic oligonucleotide
uuauuugaccggaucuaca

SEQ ID NO: 160926 - RNA, 19 nt, Artificial Sequence
  Description of Artificial Sequence: Synthetic oligonucleotide
acccaccagagugaugugu

SEQ ID NO: 160927 - RNA, 19 nt, Artificial Sequence
  Description of Artificial Sequence: Synthetic oligonucleotide
uggucuuucggggugcucc

SEQ ID NO: 160928 - RNA, 19 nt, Artificial Sequence
  Description of Artificial Sequence: Synthetic oligonucleotide
cugugggagaucuucacuc

SEQ ID NO: 160929 - RNA, 19 nt, Artificial Sequence
  Description of Artificial Sequence: Synthetic oligonucleotide
cugggcggcuccccauacc

SEQ ID NO: 160930 - RNA, 19 nt, Artificial Sequence
  Description of Artificial Sequence: Synthetic oligonucleotide
cccggugugccuguggagg

SEQ ID NO: 160931 - RNA, 19 nt, Artificial Sequence
  Description of Artificial Sequence: Synthetic oligonucleotide
gaacuuuucaagcugcuga

SEQ ID NO: 160932 - RNA, 19 nt, Artificial Sequence
  Description of Artificial Sequence: Synthetic oligonucleotide
aaggagggucaccgcaugg

SEQ ID NO: 160933 - RNA, 19 nt, Artificial Sequence
  Description of Artificial Sequence: Synthetic oligonucleotide
gacaagcccaguaacugca

SEQ ID NO: 160934 - RNA, 19 nt, Artificial Sequence
  Description of Artificial Sequence: Synthetic oligonucleotide
accaacgagcuguacauga

SEQ ID NO: 160935 - RNA, 19 nt, Artificial Sequence
  Description of Artificial Sequence: Synthetic oligonucleotide
augaugcgggacugcuggc

SEQ ID NO: 160936 - RNA, 19 nt, Artificial Sequence
  Description of Artificial Sequence: Synthetic oligonucleotide
caugcagugcccucacaga

SEQ ID NO: 160937 - RNA, 19 nt, Artificial Sequence
  Description of Artificial Sequence: Synthetic oligonucleotide
agacccaccuucaagcagc

SEQ ID NO: 160938 - RNA, 19 nt, Artificial Sequence
  Description of Artificial Sequence: Synthetic oligonucleotide
cugguggaagaccuggacc

SEQ ID NO: 160939 - RNA, 19 nt, Artificial Sequence
  Description of Artificial Sequence: Synthetic oligonucleotide
cgcaucguggccuugaccu

SEQ ID NO: 160940 - RNA, 19 nt, Artificial Sequence
  Description of Artificial Sequence: Synthetic oligonucleotide
uccaaccaggaguaccugg

SEQ ID NO: 160941 - RNA, 19 nt, Artificial Sequence
  Description of Artificial Sequence: Synthetic oligonucleotide
gaccuguccaugccccugg

SEQ ID NO: 160942 - RNA, 19 nt, Artificial Sequence
  Description of Artificial Sequence: Synthetic oligonucleotide
gaccaguacucccccagcu

SEQ ID NO: 160943 - RNA, 19 nt, Artificial Sequence
  Description of Artificial Sequence: Synthetic oligonucleotide
uuucccgacacccggagcu

SEQ ID NO: 160944 - RNA, 19 nt, Artificial Sequence
  Description of Artificial Sequence: Synthetic oligonucleotide
ucuacgugcuccucagggg

SEQ ID NO: 160945 - RNA, 19 nt, Artificial Sequence
  Description of Artificial Sequence: Synthetic oligonucleotide
gaggauuccgucuucucuc

SEQ ID NO: 160946 - RNA, 19 nt, Artificial Sequence
  Description of Artificial Sequence: Synthetic oligonucleotide
caugagccgcugcccgagg

SEQ ID NO: 160947 - RNA, 19 nt, Artificial Sequence
  Description of Artificial Sequence: Synthetic oligonucleotide
gagcccugccugccccgac

SEQ ID NO: 160948 - RNA, 19 nt, Artificial Sequence
  Description of Artificial Sequence: Synthetic oligonucleotide
cacccagcccagcuugcca

SEQ ID NO: 160949 - RNA, 19 nt, Artificial Sequence
  Description of Artificial Sequence: Synthetic oligonucleotide
aauggcggacucaaacgcc

SEQ ID NO: 160950 - RNA, 19 nt, Artificial Sequence
  Description of Artificial Sequence: Synthetic oligonucleotide
cgcugacugccacccacac

SEQ ID NO: 160951 - RNA, 19 nt, Artificial Sequence
  Description of Artificial Sequence: Synthetic oligonucleotide
cgcccuccccagacuccac

SEQ ID NO: 160952 - RNA, 19 nt, Artificial Sequence
  Description of Artificial Sequence: Synthetic oligonucleotide
ccgucagcuguaacccuca

SEQ ID NO: 160953 - RNA, 19 nt, Artificial Sequence
  Description of Artificial Sequence: Synthetic oligonucleotide
acccacagccccugcuggg

SEQ ID NO: 160954 - RNA, 19 nt, Artificial Sequence
  Description of Artificial Sequence: Synthetic oligonucleotide
gcccaccaccuguccgucc

SEQ ID NO: 160955 - RNA, 19 nt, Artificial Sequence
  Description of Artificial Sequence: Synthetic oligonucleotide
ccuguccccuuuccugcug

SEQ ID NO: 160956 - RNA, 19 nt, Artificial Sequence
  Description of Artificial Sequence: Synthetic oligonucleotide
ggcaggagccggcugccua

SEQ ID NO: 160957 - RNA, 19 nt, Artificial Sequence
  Description of Artificial Sequence: Synthetic oligonucleotide
accaggggccuuccugugu

SEQ ID NO: 160958 - RNA, 19 nt, Artificial Sequence
  Description of Artificial Sequence: Synthetic oligonucleotide
uggccugccuucaccccac

SEQ ID NO: 160959 - RNA, 19 nt, Artificial Sequence
  Description of Artificial Sequence: Synthetic oligonucleotide
cucagcucaccucucccuc

SEQ ID NO: 160960 - RNA, 19 nt, Artificial Sequence
  Description of Artificial Sequence: Synthetic oligonucleotide
ccaccuccucuccaccugc

SEQ ID NO: 160961 - RNA, 19 nt, Artificial Sequence
  Description of Artificial Sequence: Synthetic oligonucleotide
cuggugagaggugcaaaga

SEQ ID NO: 160962 - RNA, 19 nt, Artificial Sequence
  Description of Artificial Sequence: Synthetic oligonucleotide
aggcagaucuuugcugcca

SEQ ID NO: 160963 - RNA, 19 nt, Artificial Sequence
  Description of Artificial Sequence: Synthetic oligonucleotide
agccacuucauccccuccc

SEQ ID NO: 160964 - RNA, 19 nt, Artificial Sequence
  Description of Artificial Sequence: Synthetic oligonucleotide
cagauguuggaccaacacc

SEQ ID NO: 160965 - RNA, 19 nt, Artificial Sequence
  Description of Artificial Sequence: Synthetic oligonucleotide
cccucccugccaccaggca

SEQ ID NO: 160966 - RNA, 19 nt, Artificial Sequence
  Description of Artificial Sequence: Synthetic oligonucleotide
acugccuggagggcaggga

SEQ ID NO: 160967 - RNA, 19 nt, Artificial Sequence
  Description of Artificial Sequence: Synthetic oligonucleotide
agugggagccaaugaacag

SEQ ID NO: 160968 - RNA, 19 nt, Artificial Sequence
  Description of Artificial Sequence: Synthetic oligonucleotide
ggcaugcaagugagagcuu

SEQ ID NO: 160969 - RNA, 19 nt, Artificial Sequence
  Description of Artificial Sequence: Synthetic oligonucleotide
uccugagcuuucuccuguc

SEQ ID NO: 160970 - RNA, 19 nt, Artificial Sequence
  Description of Artificial Sequence: Synthetic oligonucleotide
cgguuuggucuguuuugcc

SEQ ID NO: 160971 - RNA, 19 nt, Artificial Sequence
  Description of Artificial Sequence: Synthetic oligonucleotide
cuucacccauaagccccuc

SEQ ID NO: 160972 - RNA, 19 nt, Artificial Sequence
  Description of Artificial Sequence: Synthetic oligonucleotide
cgcacucugguggcaggug

SEQ ID NO: 160973 - RNA, 19 nt, Artificial Sequence
  Description of Artificial Sequence: Synthetic oligonucleotide
gccuuguccucagggcuac

SEQ ID NO: 160974 - RNA, 19 nt, Artificial Sequence
  Description of Artificial Sequence: Synthetic oligonucleotide
cagcaguagggaggucagu

SEQ ID NO: 160975 - RNA, 19 nt, Artificial Sequence
  Description of Artificial Sequence: Synthetic oligonucleotide
ugcuucgugccucgauuga

SEQ ID NO: 160976 - RNA, 19 nt, Artificial Sequence
  Description of Artificial Sequence: Synthetic oligonucleotide
aaggugaccucugccccag

SEQ ID NO: 160977 - RNA, 19 nt, Artificial Sequence
  Description of Artificial Sequence: Synthetic oligonucleotide
gauagguggugccaguggc

SEQ ID NO: 160978 - RNA, 19 nt, Artificial Sequence
  Description of Artificial Sequence: Synthetic oligonucleotide
cuuauuaauuccgauacua

SEQ ID NO: 160979 - RNA, 19 nt, Artificial Sequence
  Description of Artificial Sequence: Synthetic oligonucleotide
aguuugcuuugcugaccaa

SEQ ID NO: 160980 - RNA, 19 nt, Artificial Sequence
  Description of Artificial Sequence: Synthetic oligonucleotide
aaugccugguaccagagga

SEQ ID NO: 160981 - RNA, 19 nt, Artificial Sequence
  Description of Artificial Sequence: Synthetic oligonucleotide
auggugaggcgaaggccag

SEQ ID NO: 160982 - RNA, 19 nt, Artificial Sequence
  Description of Artificial Sequence: Synthetic oligonucleotide
gguugggggcaguguugug

SEQ ID NO: 160983 - RNA, 19 nt, Artificial Sequence
  Description of Artificial Sequence: Synthetic oligonucleotide
ggcccuggggcccagcccc

SEQ ID NO: 160984 - RNA, 19 nt, Artificial Sequence
  Description of Artificial Sequence: Synthetic oligonucleotide
caaacugggggcucuguau

SEQ ID NO: 160985 - RNA, 19 nt, Artificial Sequence
  Description of Artificial Sequence: Synthetic oligonucleotide
uauagcuaugaagaaaaca

SEQ ID NO: 160986 - RNA, 19 nt, Artificial Sequence
  Description of Artificial Sequence: Synthetic oligonucleotide
acaaaguguauaaaucuga

SEQ ID NO: 160987 - RNA, 19 nt, Artificial Sequence
  Description of Artificial Sequence: Synthetic oligonucleotide
aguauauauuuacaugucu

SEQ ID NO: 160988 - RNA, 19 nt, Artificial Sequence
  Description of Artificial Sequence: Synthetic oligonucleotide
uuuuuaaaagggucguuac

SEQ ID NO: 160989 - RNA, 19 nt, Artificial Sequence
  Description of Artificial Sequence: Synthetic oligonucleotide
ccagagauuuacccaucgg

SEQ ID NO: 160990 - RNA, 19 nt, Artificial Sequence
  Description of Artificial Sequence: Synthetic oligonucleotide
gguaagaugcuccuggugg

SEQ ID NO: 160991 - RNA, 19 nt, Artificial Sequence
  Description of Artificial Sequence: Synthetic oligonucleotide
gcugggaggcaucaguugc

SEQ ID NO: 160992 - RNA, 19 nt, Artificial Sequence
  Description of Artificial Sequence: Synthetic oligonucleotide
cuauauauuaaaaacaaaa

SEQ ID NO: 160993 - RNA, 19 nt, Artificial Sequence
  Description of Artificial Sequence: Synthetic oligonucleotide
aaagaaaaaaaaggaaaau

SEQ ID NO: 160994 - RNA, 19 nt, Artificial Sequence
  Description of Artificial Sequence: Synthetic oligonucleotide
uguuuuuaaaaaggucaua

SEQ ID NO: 160995 - RNA, 19 nt, Artificial Sequence
  Description of Artificial Sequence: Synthetic oligonucleotide
auauuuuuugcuacuuuug

SEQ ID NO: 160996 - RNA, 19 nt, Artificial Sequence
  Description of Artificial Sequence: Synthetic oligonucleotide
gcuguuuuauuuuuuuaaa

SEQ ID NO: 160997 - RNA, 19 nt, Artificial Sequence
  Description of Artificial Sequence: Synthetic oligonucleotide
auuauguucuaaaccuauu

SEQ ID NO: 160998 - RNA, 19 nt, Artificial Sequence
  Description of Artificial Sequence: Synthetic oligonucleotide
uuucaguuuaggucccuca

SEQ ID NO: 160999 - RNA, 19 nt, Artificial Sequence
  Description of Artificial Sequence: Synthetic oligonucleotide
aauaaaaauugcugcugcu

SEQ ID NO: 161000 - RNA, 19 nt, Artificial Sequence
  Description of Artificial Sequence: Synthetic oligonucleotide
uucauuuaucuaugggcug

SEQ ID NO: 161001 - RNA, 19 nt, Artificial Sequence
  Description of Artificial Sequence: Synthetic oligonucleotide
guaugaaaagggugggaau

SEQ ID NO: 161002 - RNA, 19 nt, Artificial Sequence
  Description of Artificial Sequence: Synthetic oligonucleotide
uguccacuggaaagaaggg

SEQ ID NO: 161003 - RNA, 19 nt, Artificial Sequence
  Description of Artificial Sequence: Synthetic oligonucleotide
gacacccacgggcccuggg

SEQ ID NO: 161004 - RNA, 19 nt, Artificial Sequence
  Description of Artificial Sequence: Synthetic oligonucleotide
ggcuaggucugucccgagg

SEQ ID NO: 161005 - RNA, 19 nt, Artificial Sequence
  Description of Artificial Sequence: Synthetic oligonucleotide
ggcaccgcaugcucccggc

SEQ ID NO: 161006 - RNA, 19 nt, Artificial Sequence
  Description of Artificial Sequence: Synthetic oligonucleotide
cgcagguuccuuguaaccu

SEQ ID NO: 161007 - RNA, 19 nt, Artificial Sequence
  Description of Artificial Sequence: Synthetic oligonucleotide
ucuucuuccuagguccugc

SEQ ID NO: 161008 - RNA, 19 nt, Artificial Sequence
  Description of Artificial Sequence: Synthetic oligonucleotide
cacccagaccucacgacgc

SEQ ID NO: 161009 - RNA, 19 nt, Artificial Sequence
  Description of Artificial Sequence: Synthetic oligonucleotide
caccuccugccucuccgcu

SEQ ID NO: 161010 - RNA, 19 nt, Artificial Sequence
  Description of Artificial Sequence: Synthetic oligonucleotide
ugcuuuuggaaagucagaa

SEQ ID NO: 161011 - RNA, 19 nt, Artificial Sequence
  Description of Artificial Sequence: Synthetic oligonucleotide
aaaagaagaugucugcuuc

SEQ ID NO: 161012 - RNA, 19 nt, Artificial Sequence
  Description of Artificial Sequence: Synthetic oligonucleotide
cgagggcaggaaccccauc

SEQ ID NO: 161013 - RNA, 19 nt, Artificial Sequence
  Description of Artificial Sequence: Synthetic oligonucleotide
ccaugcaguagaggcgcug

SEQ ID NO: 161014 - RNA, 19 nt, Artificial Sequence
  Description of Artificial Sequence: Synthetic oligonucleotide
gggcagagagucaaggccc

SEQ ID NO: 161015 - RNA, 19 nt, Artificial Sequence
  Description of Artificial Sequence: Synthetic oligonucleotide
cagcagccaucgaccaugg

SEQ ID NO: 161016 - RNA, 19 nt, Artificial Sequence
  Description of Artificial Sequence: Synthetic oligonucleotide
gaugguuuccuccaaggaa

SEQ ID NO: 161017 - RNA, 19 nt, Artificial Sequence
  Description of Artificial Sequence: Synthetic oligonucleotide
aaccggugggguugggcug

SEQ ID NO: 161018 - RNA, 19 nt, Artificial Sequence
  Description of Artificial Sequence: Synthetic oligonucleotide
ggggagggggcaccuaccu

SEQ ID NO: 161019 - RNA, 19 nt, Artificial Sequence
  Description of Artificial Sequence: Synthetic oligonucleotide
uaggaauagccacggggua

SEQ ID NO: 161020 - RNA, 19 nt, Artificial Sequence
  Description of Artificial Sequence: Synthetic oligonucleotide
agagcuacagugauuaaga

SEQ ID NO: 161021 - RNA, 19 nt, Artificial Sequence
  Description of Artificial Sequence: Synthetic oligonucleotide
aggaaagcaagggcgcggu

SEQ ID NO: 161022 - RNA, 19 nt, Artificial Sequence
  Description of Artificial Sequence: Synthetic oligonucleotide
uugcucacgccuguaaucc

SEQ ID NO: 161023 - RNA, 19 nt, Artificial Sequence
  Description of Artificial Sequence: Synthetic oligonucleotide
ccagcacuuugggacaccg

SEQ ID NO: 161024 - RNA, 19 nt, Artificial Sequence
  Description of Artificial Sequence: Synthetic oligonucleotide
gaggugggcagaucacuuc

SEQ ID NO: 161025 - RNA, 19 nt, Artificial Sequence
  Description of Artificial Sequence: Synthetic oligonucleotide
caggucaggaguuugagac

SEQ ID NO: 161026 - RNA, 19 nt, Artificial Sequence
  Description of Artificial Sequence: Synthetic oligonucleotide
ccagccuggccaacuuagu

SEQ ID NO: 161027 - RNA, 19 nt, Artificial Sequence
  Description of Artificial Sequence: Synthetic oligonucleotide
ugaaaccccaucucuacua

SEQ ID NO: 161028 - RNA, 19 nt, Artificial Sequence
  Description of Artificial Sequence: Synthetic oligonucleotide
aaaaaugcaaaaauuaucc

SEQ ID NO: 161029 - RNA, 19 nt, Artificial Sequence
  Description of Artificial Sequence: Synthetic oligonucleotide
caggcaugguggcacacgc

SEQ ID NO: 161030 - RNA, 19 nt, Artificial Sequence
  Description of Artificial Sequence: Synthetic oligonucleotide
ccuguaaucccagcuccac

SEQ ID NO: 161031 - RNA, 19 nt, Artificial Sequence
  Description of Artificial Sequence: Synthetic oligonucleotide
caggaggcugaggcagaau

SEQ ID NO: 161032 - RNA, 19 nt, Artificial Sequence
  Description of Artificial Sequence: Synthetic oligonucleotide
ucccuugaagcugggaggc

SEQ ID NO: 161033 - RNA, 19 nt, Artificial Sequence
  Description of Artificial Sequence: Synthetic oligonucleotide
cggagguugcagugagccg

SEQ ID NO: 161034 - RNA, 19 nt, Artificial Sequence
  Description of Artificial Sequence: Synthetic oligonucleotide
gagauugcgccauugcacu

SEQ ID NO: 161035 - RNA, 19 nt, Artificial Sequence
  Description of Artificial Sequence: Synthetic oligonucleotide
uccagccugggcaacagag

SEQ ID NO: 161036 - RNA, 19 nt, Artificial Sequence
  Description of Artificial Sequence: Synthetic oligonucleotide
gaaaacaaaaaggaaaaca

SEQ ID NO: 161037 - RNA, 19 nt, Artificial Sequence
  Description of Artificial Sequence: Synthetic oligonucleotide
aaaugaugaaggucugcag

SEQ ID NO: 161038 - RNA, 19 nt, Artificial Sequence
  Description of Artificial Sequence: Synthetic oligonucleotide
gaaacugaaacccagacau

SEQ ID NO: 161039 - RNA, 19 nt, Artificial Sequence
  Description of Artificial Sequence: Synthetic oligonucleotide
ugugucugcccccucuaug

SEQ ID NO: 161040 - RNA, 19 nt, Artificial Sequence
  Description of Artificial Sequence: Synthetic oligonucleotide
gugggcaugguuuugccag

SEQ ID NO: 161041 - RNA, 19 nt, Artificial Sequence
  Description of Artificial Sequence: Synthetic oligonucleotide
gugcuucuaagugcaggag

SEQ ID NO: 161042 - RNA, 19 nt, Artificial Sequence
  Description of Artificial Sequence: Synthetic oligonucleotide
gaacaugucaccugaggcu

SEQ ID NO: 161043 - RNA, 19 nt, Artificial Sequence
  Description of Artificial Sequence: Synthetic oligonucleotide
uaguuuugcauucaggucc

SEQ ID NO: 161044 - RNA, 19 nt, Artificial Sequence
  Description of Artificial Sequence: Synthetic oligonucleotide
ccuggcuucguuucuuguu

SEQ ID NO: 161045 - RNA, 19 nt, Artificial Sequence
  Description of Artificial Sequence: Synthetic oligonucleotide
ugguaugccuccccagauc

SEQ ID NO: 161046 - RNA, 19 nt, Artificial Sequence
  Description of Artificial Sequence: Synthetic oligonucleotide
cguccuuccuguauccaug

SEQ ID NO: 161047 - RNA, 19 nt, Artificial Sequence
  Description of Artificial Sequence: Synthetic oligonucleotide
gugaccagacuguauuugu

SEQ ID NO: 161048 - RNA, 19 nt, Artificial Sequence
  Description of Artificial Sequence: Synthetic oligonucleotide
uugggacugucgcagaucu

SEQ ID NO: 161049 - RNA, 19 nt, Artificial Sequence
  Description of Artificial Sequence: Synthetic oligonucleotide
uuggcuucuuacaguucuu

SEQ ID NO: 161050 - RNA, 19 nt, Artificial Sequence
  Description of Artificial Sequence: Synthetic oligonucleotide
uccuguccaaacuccaucc

SEQ ID NO: 161051 - RNA, 19 nt, Artificial Sequence
  Description of Artificial Sequence: Synthetic oligonucleotide
cugucccucaggaacgggg

SEQ ID NO: 161052 - RNA, 19 nt, Artificial Sequence
  Description of Artificial Sequence: Synthetic oligonucleotide
gggaaaauucuccgaaugu

SEQ ID NO: 161053 - RNA, 19 nt, Artificial Sequence
  Description of Artificial Sequence: Synthetic oligonucleotide
uuuuugguuuuuuggcugc

SEQ ID NO: 161054 - RNA, 19 nt, Artificial Sequence
  Description of Artificial Sequence: Synthetic oligonucleotide
cuuggaauuuacuucugcc

SEQ ID NO: 161055 - RNA, 19 nt, Artificial Sequence
  Description of Artificial Sequence: Synthetic oligonucleotide
caccugcuggucaucacug

SEQ ID NO: 161056 - RNA, 19 nt, Artificial Sequence
  Description of Artificial Sequence: Synthetic oligonucleotide
guccucacuaaguggauuc

SEQ ID NO: 161057 - RNA, 19 nt, Artificial Sequence
  Description of Artificial Sequence: Synthetic oligonucleotide
cuggcucccccguaccuca

SEQ ID NO: 161058 - RNA, 19 nt, Artificial Sequence
  Description of Artificial Sequence: Synthetic oligonucleotide
auggcucaaacuaccacuc

SEQ ID NO: 161059 - RNA, 19 nt, Artificial Sequence
  Description of Artificial Sequence: Synthetic oligonucleotide
ccucagucgcuauauuaaa

SEQ ID NO: 161060 - RNA, 19 nt, Artificial Sequence
  Description of Artificial Sequence: Synthetic oligonucleotide
agcuuauauuuugcuggau

SEQ ID NO: 161061 - RNA, 19 nt, Artificial Sequence
  Description of Artificial Sequence: Synthetic oligonucleotide
uuacugcuaaauacaaaag

SEQ ID NO: 161062 - RNA, 19 nt, Artificial Sequence
  Description of Artificial Sequence: Synthetic oligonucleotide
gaaaguucaauauguuuuc

SEQ ID NO: 161063 - RNA, 19 nt, Artificial Sequence
  Description of Artificial Sequence: Synthetic oligonucleotide
cauuucuguagggaaaaug

SEQ ID NO: 161064 - RNA, 19 nt, Artificial Sequence
  Description of Artificial Sequence: Synthetic oligonucleotide
gggauugcugcuuuaaauu

SEQ ID NO: 161065 - RNA, 19 nt, Artificial Sequence
  Description of Artificial Sequence: Synthetic oligonucleotide
uucugagcuagggauuuuu

SEQ ID NO: 161066 - RNA, 19 nt, Artificial Sequence
  Description of Artificial Sequence: Synthetic oligonucleotide
uuggcagcugcaguguugg

SEQ ID NO: 161067 - RNA, 19 nt, Artificial Sequence
  Description of Artificial Sequence: Synthetic oligonucleotide
gcgacuauuguaaaauucu

SEQ ID NO: 161068 - RNA, 19 nt, Artificial Sequence
  Description of Artificial Sequence: Synthetic oligonucleotide
ucuuuguuucucucuguaa

SEQ ID NO: 161069 - RNA, 19 nt, Artificial Sequence
  Description of Artificial Sequence: Synthetic oligonucleotide
aauagcaccugcuaacauu

SEQ ID NO: 161070 - RNA, 19 nt, Artificial Sequence
  Description of Artificial Sequence: Synthetic oligonucleotide
uacaauuuguauuuauguu

SEQ ID NO: 161071 - RNA, 19 nt, Artificial Sequence
  Description of Artificial Sequence: Synthetic oligonucleotide
uuaaagaaggcaucauuug

SEQ ID NO: 161072 - RNA, 19 nt, Artificial Sequence
  Description of Artificial Sequence: Synthetic oligonucleotide
ggugaacagaacuaggaaa

SEQ ID NO: 161073 - RNA, 19 nt, Artificial Sequence
  Description of Artificial Sequence: Synthetic oligonucleotide
augaauuuuuagcucuuaa

SEQ ID NO: 161074 - RNA, 19 nt, Artificial Sequence
  Description of Artificial Sequence: Synthetic oligonucleotide
aaagcauuugcuuugagac

SEQ ID NO: 161075 - RNA, 19 nt, Artificial Sequence
  Description of Artificial Sequence: Synthetic oligonucleotide
ccgcacaggagugucuuuc

SEQ ID NO: 161076 - RNA, 19 nt, Artificial Sequence
  Description of Artificial Sequence: Synthetic oligonucleotide
ccuuguaaaacagugauga

SEQ ID NO: 161077 - RNA, 19 nt, Artificial Sequence
  Description of Artificial Sequence: Synthetic oligonucleotide
auaauuucugccuuggccc

SEQ ID NO: 161078 - RNA, 19 nt, Artificial Sequence
  Description of Artificial Sequence: Synthetic oligonucleotide
cuaccuugaagcaauguug

SEQ ID NO: 161079 - RNA, 19 nt, Artificial Sequence
  Description of Artificial Sequence: Synthetic oligonucleotide
gugugaagggaugaagaau

SEQ ID NO: 161080 - RNA, 19 nt, Artificial Sequence
  Description of Artificial Sequence: Synthetic oligonucleotide
ucuaaaagucuucauaagu

SEQ ID NO: 161081 - RNA, 19 nt, Artificial Sequence
  Description of Artificial Sequence: Synthetic oligonucleotide
uccuugggagaggugcuag

SEQ ID NO: 161082 - RNA, 19 nt, Artificial Sequence
  Description of Artificial Sequence: Synthetic oligonucleotide
gaaaaauauaaggcacuau

SEQ ID NO: 161083 - RNA, 19 nt, Artificial Sequence
  Description of Artificial Sequence: Synthetic oligonucleotide
ucauaauuacagugauguc

SEQ ID NO: 161084 - RNA, 19 nt, Artificial Sequence
  Description of Artificial Sequence: Synthetic oligonucleotide
ccuugcuguuacuacucaa

SEQ ID NO: 161085 - RNA, 19 nt, Artificial Sequence
  Description of Artificial Sequence: Synthetic oligonucleotide
aaucacccacaaauuuccc

SEQ ID NO: 161086 - RNA, 19 nt, Artificial Sequence
  Description of Artificial Sequence: Synthetic oligonucleotide
ccaaagacugcgcuagcug

SEQ ID NO: 161087 - RNA, 19 nt, Artificial Sequence
  Description of Artificial Sequence: Synthetic oligonucleotide
gucaaauaaaagacaguga

SEQ ID NO: 161088 - RNA, 19 nt, Artificial Sequence
  Description of Artificial Sequence: Synthetic oligonucleotide
aaauugaccugaaaaaaaa

SEQ ID NO: 161089 - RNA, 19 nt, Artificial Sequence
  Description of Artificial Sequence: Synthetic oligonucleotide
gaacaagcccagcccuggg

SEQ ID NO: 161090 - RNA, 19 nt, Artificial Sequence
  Description of Artificial Sequence: Synthetic oligonucleotide
ggagccccuguggaagugg

SEQ ID NO: 161091 - RNA, 19 nt, Artificial Sequence
  Description of Artificial Sequence: Synthetic oligonucleotide
gaguccuuccugguccacc

SEQ ID NO: 161092 - RNA, 19 nt, Artificial Sequence
  Description of Artificial Sequence: Synthetic oligonucleotide
cccggugaccugcugcagc

SEQ ID NO: 161093 - RNA, 19 nt, Artificial Sequence
  Description of Artificial Sequence: Synthetic oligonucleotide
cuucgcugucggcugcggg

SEQ ID NO: 161094 - RNA, 19 nt, Artificial Sequence
  Description of Artificial Sequence: Synthetic oligonucleotide
gacgaugugcagagcauca

SEQ ID NO: 161095 - RNA, 19 nt, Artificial Sequence
  Description of Artificial Sequence: Synthetic oligonucleotide
aacuggcugcgggacgggg

SEQ ID NO: 161096 - RNA, 19 nt, Artificial Sequence
  Description of Artificial Sequence: Synthetic oligonucleotide
gugcagcuggcggaaagca

SEQ ID NO: 161097 - RNA, 19 nt, Artificial Sequence
  Description of Artificial Sequence: Synthetic oligonucleotide
aaccgcacccgcaucacag

SEQ ID NO: 161098 - RNA, 19 nt, Artificial Sequence
  Description of Artificial Sequence: Synthetic oligonucleotide
ggggaggagguggaggugc

SEQ ID NO: 161099 - RNA, 19 nt, Artificial Sequence
  Description of Artificial Sequence: Synthetic oligonucleotide
caggacuccgugcccgcag

SEQ ID NO: 161100 - RNA, 19 nt, Artificial Sequence
  Description of Artificial Sequence: Synthetic oligonucleotide
gacuccggccucuaugcuu

SEQ ID NO: 161101 - RNA, 19 nt, Artificial Sequence
  Description of Artificial Sequence: Synthetic oligonucleotide
ugcguaaccagcagccccu

SEQ ID NO: 161102 - RNA, 19 nt, Artificial Sequence
  Description of Artificial Sequence: Synthetic oligonucleotide
ucgggcagugacaccaccu

SEQ ID NO: 161103 - RNA, 19 nt, Artificial Sequence
  Description of Artificial Sequence: Synthetic oligonucleotide
uacuucuccgucaauguuu

SEQ ID NO: 161104 - RNA, 19 nt, Artificial Sequence
  Description of Artificial Sequence: Synthetic oligonucleotide
ucagaugcucuccccuccu

SEQ ID NO: 161105 - RNA, 19 nt, Artificial Sequence
  Description of Artificial Sequence: Synthetic oligonucleotide
ucggaggaugaugaugaug

SEQ ID NO: 161106 - RNA, 19 nt, Artificial Sequence
  Description of Artificial Sequence: Synthetic oligonucleotide
gaugaugacuccucuucag

SEQ ID NO: 161107 - RNA, 19 nt, Artificial Sequence
  Description of Artificial Sequence: Synthetic oligonucleotide
gaggagaaagaaacagaua

SEQ ID NO: 161108 - RNA, 19 nt, Artificial Sequence
  Description of Artificial Sequence: Synthetic oligonucleotide
aacaccaaaccaaaccccg

SEQ ID NO: 161109 - RNA, 19 nt, Artificial Sequence
  Description of Artificial Sequence: Synthetic oligonucleotide
guagcuccauauuggacau

SEQ ID NO: 161110 - RNA, 19 nt, Artificial Sequence
  Description of Artificial Sequence: Synthetic oligonucleotide
uccccagaaaagauggaaa

SEQ ID NO: 161111 - RNA, 19 nt, Artificial Sequence
  Description of Artificial Sequence: Synthetic oligonucleotide
aagaaauugcaugcagugc

SEQ ID NO: 161112 - RNA, 19 nt, Artificial Sequence
  Description of Artificial Sequence: Synthetic oligonucleotide
ccggcugccaagacaguga

SEQ ID NO: 161113 - RNA, 19 nt, Artificial Sequence
  Description of Artificial Sequence: Synthetic oligonucleotide
aaguucaaaugcccuucca

SEQ ID NO: 161114 - RNA, 19 nt, Artificial Sequence
  Description of Artificial Sequence: Synthetic oligonucleotide
agugggaccccaaacccca

SEQ ID NO: 161115 - RNA, 19 nt, Artificial Sequence
  Description of Artificial Sequence: Synthetic oligonucleotide
acacugcgcugguugaaaa

SEQ ID NO: 161116 - RNA, 19 nt, Artificial Sequence
  Description of Artificial Sequence: Synthetic oligonucleotide
aauggcaaagaauucaaac

SEQ ID NO: 161117 - RNA, 19 nt, Artificial Sequence
  Description of Artificial Sequence: Synthetic oligonucleotide
ccugaccacagaauuggag

SEQ ID NO: 161118 - RNA, 19 nt, Artificial Sequence
  Description of Artificial Sequence: Synthetic oligonucleotide
ggcuacaagguccguuaug

SEQ ID NO: 161119 - RNA, 19 nt, Artificial Sequence
  Description of Artificial Sequence: Synthetic oligonucleotide
gccaccuggagcaucauaa

SEQ ID NO: 161120 - RNA, 19 nt, Artificial Sequence
  Description of Artificial Sequence: Synthetic oligonucleotide
auggacucuguggugcccu

SEQ ID NO: 161121 - RNA, 19 nt, Artificial Sequence
  Description of Artificial Sequence: Synthetic oligonucleotide
ucugacaagggcaacuaca

SEQ ID NO: 161122 - RNA, 19 nt, Artificial Sequence
  Description of Artificial Sequence: Synthetic oligonucleotide
accugcauuguggagaaug

SEQ ID NO: 161123 - RNA, 19 nt, Artificial Sequence
  Description of Artificial Sequence: Synthetic oligonucleotide
gaguacggcagcaucaacc

SEQ ID NO: 161124 - RNA, 19 nt, Artificial Sequence
  Description of Artificial Sequence: Synthetic oligonucleotide
cacacauaccagcuggaug

SEQ ID NO: 161125 - RNA, 19 nt, Artificial Sequence
  Description of Artificial Sequence: Synthetic oligonucleotide
gucguggagcgguccccuc

SEQ ID NO: 161126 - RNA, 19 nt, Artificial Sequence
  Description of Artificial Sequence: Synthetic oligonucleotide
caccggcccauccugcaag

SEQ ID NO: 161127 - RNA, 19 nt, Artificial Sequence
  Description of Artificial Sequence: Synthetic oligonucleotide
gcaggguugcccgccaaca

SEQ ID NO: 161128 - RNA, 19 nt, Artificial Sequence
  Description of Artificial Sequence: Synthetic oligonucleotide
aaaacaguggcccugggua

SEQ ID NO: 161129 - RNA, 19 nt, Artificial Sequence
  Description of Artificial Sequence: Synthetic oligonucleotide
agcaacguggaguucaugu

SEQ ID NO: 161130 - RNA, 19 nt, Artificial Sequence
  Description of Artificial Sequence: Synthetic oligonucleotide
uguaagguguacagugacc

SEQ ID NO: 161131 - RNA, 19 nt, Artificial Sequence
  Description of Artificial Sequence: Synthetic oligonucleotide
ccgcagccgcacauccagu

SEQ ID NO: 161132 - RNA, 19 nt, Artificial Sequence
  Description of Artificial Sequence: Synthetic oligonucleotide
uggcuaaagcacaucgagg

SEQ ID NO: 161133 - RNA, 19 nt, Artificial Sequence
  Description of Artificial Sequence: Synthetic oligonucleotide
gugaaugggagcaagauug

SEQ ID NO: 161134 - RNA, 19 nt, Artificial Sequence
  Description of Artificial Sequence: Synthetic oligonucleotide
ggcccagacaaccugccuu

SEQ ID NO: 161135 - RNA, 19 nt, Artificial Sequence
  Description of Artificial Sequence: Synthetic oligonucleotide
uauguccagaucuugaaga

SEQ ID NO: 161136 - RNA, 19 nt, Artificial Sequence
  Description of Artificial Sequence: Synthetic oligonucleotide
acugcuggaguuaauacca

SEQ ID NO: 161137 - RNA, 19 nt, Artificial Sequence
  Description of Artificial Sequence: Synthetic oligonucleotide
accgacaaagagauggagg

SEQ ID NO: 161138 - RNA, 19 nt, Artificial Sequence
  Description of Artificial Sequence: Synthetic oligonucleotide
gugcuucacuuaagaaaug

SEQ ID NO: 161139 - RNA, 19 nt, Artificial Sequence
  Description of Artificial Sequence: Synthetic oligonucleotide
gucuccuuugaggacgcag

SEQ ID NO: 161140 - RNA, 19 nt, Artificial Sequence
  Description of Artificial Sequence: Synthetic oligonucleotide
ggggaguauacgugcuugg

SEQ ID NO: 161141 - RNA, 19 nt, Artificial Sequence
  Description of Artificial Sequence: Synthetic oligonucleotide
gcggguaacucuaucggac

SEQ ID NO: 161142 - RNA, 19 nt, Artificial Sequence
  Description of Artificial Sequence: Synthetic oligonucleotide
cucucccaucacucugcau

SEQ ID NO: 161143 - RNA, 19 nt, Artificial Sequence
  Description of Artificial Sequence: Synthetic oligonucleotide
ugguugaccguucuggaag

SEQ ID NO: 161144 - RNA, 19 nt, Artificial Sequence
  Description of Artificial Sequence: Synthetic oligonucleotide
gcccuggaagagaggccgg

SEQ ID NO: 161145 - RNA, 19 nt, Artificial Sequence
  Description of Artificial Sequence: Synthetic oligonucleotide
gcagugaugaccucgcccc

SEQ ID NO: 161146 - RNA, 19 nt, Artificial Sequence
  Description of Artificial Sequence: Synthetic oligonucleotide
cuguaccuggagaucauca

SEQ ID NO: 161147 - RNA, 19 nt, Artificial Sequence
  Description of Artificial Sequence: Synthetic oligonucleotide
aucuauugcacaggggccu

SEQ ID NO: 161148 - RNA, 19 nt, Artificial Sequence
  Description of Artificial Sequence: Synthetic oligonucleotide
uuccucaucuccugcaugg

SEQ ID NO: 161149 - RNA, 19 nt, Artificial Sequence
  Description of Artificial Sequence: Synthetic oligonucleotide
guggggucggucaucgucu

SEQ ID NO: 161150 - RNA, 19 nt, Artificial Sequence
  Description of Artificial Sequence: Synthetic oligonucleotide
uacaagaugaagaguggua

SEQ ID NO: 161151 - RNA, 19 nt, Artificial Sequence
  Description of Artificial Sequence: Synthetic oligonucleotide
accaagaagagugacuucc

SEQ ID NO: 161152 - RNA, 19 nt, Artificial Sequence
  Description of Artificial Sequence: Synthetic oligonucleotide
cacagccagauggcugugc

SEQ ID NO: 161153 - RNA, 19 nt, Artificial Sequence
  Description of Artificial Sequence: Synthetic oligonucleotide
cacaagcuggccaagagca

SEQ ID NO: 161154 - RNA, 19 nt, Artificial Sequence
  Description of Artificial Sequence: Synthetic oligonucleotide
aucccucugcgcagacagg

SEQ ID NO: 161155 - RNA, 19 nt, Artificial Sequence
  Description of Artificial Sequence: Synthetic oligonucleotide
guaacagugucugcugacu

SEQ ID NO: 161156 - RNA, 19 nt, Artificial Sequence
  Description of Artificial Sequence: Synthetic oligonucleotide
uccagugcauccaugaacu

SEQ ID NO: 161157 - RNA, 19 nt, Artificial Sequence
  Description of Artificial Sequence: Synthetic oligonucleotide
ucugggguucuucugguuc

SEQ ID NO: 161158 - RNA, 19 nt, Artificial Sequence
  Description of Artificial Sequence: Synthetic oligonucleotide
cggccaucacggcucuccu

SEQ ID NO: 161159 - RNA, 19 nt, Artificial Sequence
  Description of Artificial Sequence: Synthetic oligonucleotide
uccagugggacucccaugc

SEQ ID NO: 161160 - RNA, 19 nt, Artificial Sequence
  Description of Artificial Sequence: Synthetic oligonucleotide
cuagcaggggucucugagu

SEQ ID NO: 161161 - RNA, 19 nt, Artificial Sequence
  Description of Artificial Sequence: Synthetic oligonucleotide
uaugagcuucccgaagacc

SEQ ID NO: 161162 - RNA, 19 nt, Artificial Sequence
  Description of Artificial Sequence: Synthetic oligonucleotide
ccucgcugggagcugccuc

SEQ ID NO: 161163 - RNA, 19 nt, Artificial Sequence
  Description of Artificial Sequence: Synthetic oligonucleotide
cgggacagacuggucuuag

SEQ ID NO: 161164 - RNA, 19 nt, Artificial Sequence
  Description of Artificial Sequence: Synthetic oligonucleotide
ggcaaaccccugggagagg

SEQ ID NO: 161165 - RNA, 19 nt, Artificial Sequence
  Description of Artificial Sequence: Synthetic oligonucleotide
ggcugcuuugggcaggugg

SEQ ID NO: 161166 - RNA, 19 nt, Artificial Sequence
  Description of Artificial Sequence: Synthetic oligonucleotide
guguuggcagaggcuaucg

SEQ ID NO: 161167 - RNA, 19 nt, Artificial Sequence
  Description of Artificial Sequence: Synthetic oligonucleotide
gggcuggacaaggacaaac

SEQ ID NO: 161168 - RNA, 19 nt, Artificial Sequence
  Description of Artificial Sequence: Synthetic oligonucleotide
cccaaccgugugaccaaag

SEQ ID NO: 161169 - RNA, 19 nt, Artificial Sequence
  Description of Artificial Sequence: Synthetic oligonucleotide
guggcugugaagauguuga

SEQ ID NO: 161170 - RNA, 19 nt, Artificial Sequence
  Description of Artificial Sequence: Synthetic oligonucleotide
aagucggacgcaacagaga

SEQ ID NO: 161171 - RNA, 19 nt, Artificial Sequence
  Description of Artificial Sequence: Synthetic oligonucleotide
aaagacuugucagaccuga

SEQ ID NO: 161172 - RNA, 19 nt, Artificial Sequence
  Description of Artificial Sequence: Synthetic oligonucleotide
aucucagaaauggagauga

SEQ ID NO: 161173 - RNA, 19 nt, Artificial Sequence
  Description of Artificial Sequence: Synthetic oligonucleotide
augaagaugaucgggaagc

SEQ ID NO: 161174 - RNA, 19 nt, Artificial Sequence
  Description of Artificial Sequence: Synthetic oligonucleotide
cauaagaauaucaucaacc

SEQ ID NO: 161175 - RNA, 19 nt, Artificial Sequence
  Description of Artificial Sequence: Synthetic oligonucleotide
cugcugggggccugcacgc

SEQ ID NO: 161176 - RNA, 19 nt, Artificial Sequence
  Description of Artificial Sequence: Synthetic oligonucleotide
caggauggucccuuguaug

SEQ ID NO: 161177 - RNA, 19 nt, Artificial Sequence
  Description of Artificial Sequence: Synthetic oligonucleotide
gucaucguggaguaugccu

SEQ ID NO: 161178 - RNA, 19 nt, Artificial Sequence
  Description of Artificial Sequence: Synthetic oligonucleotide
uccaagggcaaccugcggg

SEQ ID NO: 161179 - RNA, 19 nt, Artificial Sequence
  Description of Artificial Sequence: Synthetic oligonucleotide
gaguaccugcaggcccgga

SEQ ID NO: 161180 - RNA, 19 nt, Artificial Sequence
  Description of Artificial Sequence: Synthetic oligonucleotide
aggcccccagggcuggaau

SEQ ID NO: 161181 - RNA, 19 nt, Artificial Sequence
  Description of Artificial Sequence: Synthetic oligonucleotide
uacugcuacaaccccagcc

SEQ ID NO: 161182 - RNA, 19 nt, Artificial Sequence
  Description of Artificial Sequence: Synthetic oligonucleotide
cacaacccagaggagcagc

SEQ ID NO: 161183 - RNA, 19 nt, Artificial Sequence
  Description of Artificial Sequence: Synthetic oligonucleotide
cucuccuccaaggaccugg

SEQ ID NO: 161184 - RNA, 19 nt, Artificial Sequence
  Description of Artificial Sequence: Synthetic oligonucleotide
guguccugcgccuaccagg

SEQ ID NO: 161185 - RNA, 19 nt, Artificial Sequence
  Description of Artificial Sequence: Synthetic oligonucleotide
guggcccgaggcauggagu

SEQ ID NO: 161186 - RNA, 19 nt, Artificial Sequence
  Description of Artificial Sequence: Synthetic oligonucleotide
uaucuggccuccaagaagu

SEQ ID NO: 161187 - RNA, 19 nt, Artificial Sequence
  Description of Artificial Sequence: Synthetic oligonucleotide
ugcauacaccgagaccugg

SEQ ID NO: 161188 - RNA, 19 nt, Artificial Sequence
  Description of Artificial Sequence: Synthetic oligonucleotide
gcagccaggaauguccugg

SEQ ID NO: 161189 - RNA, 19 nt, Artificial Sequence
  Description of Artificial Sequence: Synthetic oligonucleotide
gugacagaggacaauguga

SEQ ID NO: 161190 - RNA, 19 nt, Artificial Sequence
  Description of Artificial Sequence: Synthetic oligonucleotide
augaagauagcagacuuug

SEQ ID NO: 161191 - RNA, 19 nt, Artificial Sequence
  Description of Artificial Sequence: Synthetic oligonucleotide
ggccucgcacgggacauuc

SEQ ID NO: 161192 - RNA, 19 nt, Artificial Sequence
  Description of Artificial Sequence: Synthetic oligonucleotide
caccacaucgacuacuaua

SEQ ID NO: 161193 - RNA, 19 nt, Artificial Sequence
  Description of Artificial Sequence: Synthetic oligonucleotide
aaaaagacaaccaacggcc

SEQ ID NO: 161194 - RNA, 19 nt, Artificial Sequence
  Description of Artificial Sequence: Synthetic oligonucleotide
cgacugccugugaagugga

SEQ ID NO: 161195 - RNA, 19 nt, Artificial Sequence
  Description of Artificial Sequence: Synthetic oligonucleotide
auggcacccgaggcauuau

SEQ ID NO: 161196 - RNA, 19 nt, Artificial Sequence
  Description of Artificial Sequence: Synthetic oligonucleotide
uuugaccggaucuacaccc

SEQ ID NO: 161197 - RNA, 19 nt, Artificial Sequence
  Description of Artificial Sequence: Synthetic oligonucleotide
caccagagugauguguggu

SEQ ID NO: 161198 - RNA, 19 nt, Artificial Sequence
  Description of Artificial Sequence: Synthetic oligonucleotide
ucuuucggggugcuccugu

SEQ ID NO: 161199 - RNA, 19 nt, Artificial Sequence
  Description of Artificial Sequence: Synthetic oligonucleotide
ugggagaucuucacucugg

SEQ ID NO: 161200 - RNA, 19 nt, Artificial Sequence
  Description of Artificial Sequence: Synthetic oligonucleotide
ggcggcuccccauaccccg

SEQ ID NO: 161201 - RNA, 19 nt, Artificial Sequence
  Description of Artificial Sequence: Synthetic oligonucleotide
ggugugccuguggaggaac

SEQ ID NO: 161202 - RNA, 19 nt, Artificial Sequence
  Description of Artificial Sequence: Synthetic oligonucleotide
cuuuucaagcugcugaagg

SEQ ID NO: 161203 - RNA, 19 nt, Artificial Sequence
  Description of Artificial Sequence: Synthetic oligonucleotide
gagggucaccgcauggaca

SEQ ID NO: 161204 - RNA, 19 nt, Artificial Sequence
  Description of Artificial Sequence: Synthetic oligonucleotide
aagcccaguaacugcacca

SEQ ID NO: 161205 - RNA, 19 nt, Artificial Sequence
  Description of Artificial Sequence: Synthetic oligonucleotide
aacgagcuguacaugauga

SEQ ID NO: 161206 - RNA, 19 nt, Artificial Sequence
  Description of Artificial Sequence: Synthetic oligonucleotide
augcgggacugcuggcaug

SEQ ID NO: 161207 - RNA, 19 nt, Artificial Sequence
  Description of Artificial Sequence: Synthetic oligonucleotide
gcagugcccucacagagac

SEQ ID NO: 161208 - RNA, 19 nt, Artificial Sequence
  Description of Artificial Sequence: Synthetic oligonucleotide
cccaccuucaagcagcugg

SEQ ID NO: 161209 - RNA, 19 nt, Artificial Sequence
  Description of Artificial Sequence: Synthetic oligonucleotide
guggaagaccuggaccgca

SEQ ID NO: 161210 - RNA, 19 nt, Artificial Sequence
  Description of Artificial Sequence: Synthetic oligonucleotide
aucguggccuugaccucca

SEQ ID NO: 161211 - RNA, 19 nt, Artificial Sequence
  Description of Artificial Sequence: Synthetic oligonucleotide
aaccaggaguaccuggacc

SEQ ID NO: 161212 - RNA, 19 nt, Artificial Sequence
  Description of Artificial Sequence: Synthetic oligonucleotide
cuguccaugccccuggacc

SEQ ID NO: 161213 - RNA, 19 nt, Artificial Sequence
  Description of Artificial Sequence: Synthetic oligonucleotide
caguacucccccagcuuuc

SEQ ID NO: 161214 - RNA, 19 nt, Artificial Sequence
  Description of Artificial Sequence: Synthetic oligonucleotide
cccgacacccggagcucua

SEQ ID NO: 161215 - RNA, 19 nt, Artificial Sequence
  Description of Artificial Sequence: Synthetic oligonucleotide
acgugcuccucaggggagg

SEQ ID NO: 161216 - RNA, 19 nt, Artificial Sequence
  Description of Artificial Sequence: Synthetic oligonucleotide
gauuccgucuucucucaug

SEQ ID NO: 161217 - RNA, 19 nt, Artificial Sequence
  Description of Artificial Sequence: Synthetic oligonucleotide
gagccgcugcccgaggagc

SEQ ID NO: 161218 - RNA, 19 nt, Artificial Sequence
  Description of Artificial Sequence: Synthetic oligonucleotide
cccugccugccccgacacc

SEQ ID NO: 161219 - RNA, 19 nt, Artificial Sequence
  Description of Artificial Sequence: Synthetic oligonucleotide
ccagcccagcuugccaaug

SEQ ID NO: 161220 - RNA, 19 nt, Artificial Sequence
  Description of Artificial Sequence: Synthetic oligonucleotide
ggcggacucaaacgccgcu

SEQ ID NO: 161221 - RNA, 19 nt, Artificial Sequence
  Description of Artificial Sequence: Synthetic oligonucleotide
ugacugccacccacacgcc

SEQ ID NO: 161222 - RNA, 19 nt, Artificial Sequence
  Description of Artificial Sequence: Synthetic oligonucleotide
ccuccccagacuccaccgu

SEQ ID NO: 161223 - RNA, 19 nt, Artificial Sequence
  Description of Artificial Sequence: Synthetic oligonucleotide
ucagcuguaacccucaccc

SEQ ID NO: 161224 - RNA, 19 nt, Artificial Sequence
  Description of Artificial Sequence: Synthetic oligonucleotide
cacagccccugcugggccc

SEQ ID NO: 161225 - RNA, 19 nt, Artificial Sequence
  Description of Artificial Sequence: Synthetic oligonucleotide
caccaccuguccgucccug

SEQ ID NO: 161226 - RNA, 19 nt, Artificial Sequence
  Description of Artificial Sequence: Synthetic oligonucleotide
guccccuuuccugcuggca

SEQ ID NO: 161227 - RNA, 19 nt, Artificial Sequence
  Description of Artificial Sequence: Synthetic oligonucleotide
aggagccggcugccuacca

SEQ ID NO: 161228 - RNA, 19 nt, Artificial Sequence
  Description of Artificial Sequence: Synthetic oligonucleotide
aggggccuuccuguguggc

SEQ ID NO: 161229 - RNA, 19 nt, Artificial Sequence
  Description of Artificial Sequence: Synthetic oligonucleotide
ccugccuucaccccacuca

SEQ ID NO: 161230 - RNA, 19 nt, Artificial Sequence
  Description of Artificial Sequence: Synthetic oligonucleotide
agcucaccucucccuccac

SEQ ID NO: 161231 - RNA, 19 nt, Artificial Sequence
  Description of Artificial Sequence: Synthetic oligonucleotide
ccuccucuccaccugcugg

SEQ ID NO: 161232 - RNA, 19 nt, Artificial Sequence
  Description of Artificial Sequence: Synthetic oligonucleotide
gugagaggugcaaagaggc

SEQ ID NO: 161233 - RNA, 19 nt, Artificial Sequence
  Description of Artificial Sequence: Synthetic oligonucleotide
cagaucuuugcugccagcc

SEQ ID NO: 161234 - RNA, 19 nt, Artificial Sequence
  Description of Artificial Sequence: Synthetic oligonucleotide
cacuucauccccucccaga

SEQ ID NO: 161235 - RNA, 19 nt, Artificial Sequence
  Description of Artificial Sequence: Synthetic oligonucleotide
auguuggaccaacaccccu

SEQ ID NO: 161236 - RNA, 19 nt, Artificial Sequence
  Description of Artificial Sequence: Synthetic oligonucleotide
ucccugccaccaggcacug

SEQ ID NO: 161237 - RNA, 19 nt, Artificial Sequence
  Description of Artificial Sequence: Synthetic oligonucleotide
gccuggagggcagggagug

SEQ ID NO: 161238 - RNA, 19 nt, Artificial Sequence
  Description of Artificial Sequence: Synthetic oligonucleotide
gggagccaaugaacaggca

SEQ ID NO: 161239 - RNA, 19 nt, Artificial Sequence
  Description of Artificial Sequence: Synthetic oligonucleotide
augcaagugagagcuuccu

SEQ ID NO: 161240 - RNA, 19 nt, Artificial Sequence
  Description of Artificial Sequence: Synthetic oligonucleotide
ugagcuuucuccugucggu

SEQ ID NO: 161241 - RNA, 19 nt, Artificial Sequence
  Description of Artificial Sequence: Synthetic oligonucleotide
uuuggucuguuuugccuuc

SEQ ID NO: 161242 - RNA, 19 nt, Artificial Sequence
  Description of Artificial Sequence: Synthetic oligonucleotide
cacccauaagccccucgca

SEQ ID NO: 161243 - RNA, 19 nt, Artificial Sequence
  Description of Artificial Sequence: Synthetic oligonucleotide
acucugguggcaggugccu

SEQ ID NO: 161244 - RNA, 19 nt, Artificial Sequence
  Description of Artificial Sequence: Synthetic oligonucleotide
uuguccucagggcuacagc

SEQ ID NO: 161245 - RNA, 19 nt, Artificial Sequence
  Description of Artificial Sequence: Synthetic oligonucleotide
caguagggaggucagugcu

SEQ ID NO: 161246 - RNA, 19 nt, Artificial Sequence
  Description of Artificial Sequence: Synthetic oligonucleotide
uucgugccucgauugaagg

SEQ ID NO: 161247 - RNA, 19 nt, Artificial Sequence
  Description of Artificial Sequence: Synthetic oligonucleotide
gugaccucugccccagaua

SEQ ID NO: 161248 - RNA, 19 nt, Artificial Sequence
  Description of Artificial Sequence: Synthetic oligonucleotide
agguggugccaguggcuua

SEQ ID NO: 161249 - RNA, 19 nt, Artificial Sequence
  Description of Artificial Sequence: Synthetic oligonucleotide
auuaauuccgauacuaguu

SEQ ID NO: 161250 - RNA, 19 nt, Artificial Sequence
  Description of Artificial Sequence: Synthetic oligonucleotide
uugcuuugcugaccaaaug

SEQ ID NO: 161251 - RNA, 19 nt, Artificial Sequence
  Description of Artificial Sequence: Synthetic oligonucleotide
gccugguaccagaggaugg

SEQ ID NO: 161252 - RNA, 19 nt, Artificial Sequence
  Description of Artificial Sequence: Synthetic oligonucleotide
gugaggcgaaggccagguu

SEQ ID NO: 161253 - RNA, 19 nt, Artificial Sequence
  Description of Artificial Sequence: Synthetic oligonucleotide
ugggggcaguguuguggcc

SEQ ID NO: 161254 - RNA, 19 nt, Artificial Sequence
  Description of Artificial Sequence: Synthetic oligonucleotide
ccuggggcccagccccaaa

SEQ ID NO: 161255 - RNA, 19 nt, Artificial Sequence
  Description of Artificial Sequence: Synthetic oligonucleotide
acugggggcucuguauaua

SEQ ID NO: 161256 - RNA, 19 nt, Artificial Sequence
  Description of Artificial Sequence: Synthetic oligonucleotide
agcuaugaagaaaacacaa

SEQ ID NO: 161257 - RNA, 19 nt, Artificial Sequence
  Description of Artificial Sequence: Synthetic oligonucleotide
aaguguauaaaucugagua

SEQ ID NO: 161258 - RNA, 19 nt, Artificial Sequence
  Description of Artificial Sequence: Synthetic oligonucleotide
auauauuuacaugucuuuu

SEQ ID NO: 161259 - RNA, 19 nt, Artificial Sequence
  Description of Artificial Sequence: Synthetic oligonucleotide
uuaaaagggucguuaccag

SEQ ID NO: 161260 - RNA, 19 nt, Artificial Sequence
  Description of Artificial Sequence: Synthetic oligonucleotide
gagauuuacccaucgggua

SEQ ID NO: 161261 - RNA, 19 nt, Artificial Sequence
  Description of Artificial Sequence: Synthetic oligonucleotide
aagaugcuccugguggcug

SEQ ID NO: 161262 - RNA, 19 nt, Artificial Sequence
  Description of Artificial Sequence: Synthetic oligonucleotide
gggaggcaucaguugcuau

SEQ ID NO: 161263 - RNA, 19 nt, Artificial Sequence
  Description of Artificial Sequence: Synthetic oligonucleotide
uauauuaaaaacaaaaaag

SEQ ID NO: 161264 - RNA, 19 nt, Artificial Sequence
  Description of Artificial Sequence: Synthetic oligonucleotide
gaaaaaaaaggaaaauguu

SEQ ID NO: 161265 - RNA, 19 nt, Artificial Sequence
  Description of Artificial Sequence: Synthetic oligonucleotide
uuuuaaaaaggucauauau

SEQ ID NO: 161266 - RNA, 19 nt, Artificial Sequence
  Description of Artificial Sequence: Synthetic oligonucleotide
uuuuuugcuacuuuugcug

SEQ ID NO: 161267 - RNA, 19 nt, Artificial Sequence
  Description of Artificial Sequence: Synthetic oligonucleotide
guuuuauuuuuuuaaauua

SEQ ID NO: 161268 - RNA, 19 nt, Artificial Sequence
  Description of Artificial Sequence: Synthetic oligonucleotide
auguucuaaaccuauuuuc

SEQ ID NO: 161269 - RNA, 19 nt, Artificial Sequence
  Description of Artificial Sequence: Synthetic oligonucleotide
caguuuaggucccucaaua

SEQ ID NO: 161270 - RNA, 19 nt, Artificial Sequence
  Description of Artificial Sequence: Synthetic oligonucleotide
aaaaauugcugcugcuuca

SEQ ID NO: 161271 - RNA, 19 nt, Artificial Sequence
  Description of Artificial Sequence: Synthetic oligonucleotide
auuuaucuaugggcuguau

SEQ ID NO: 161272 - RNA, 19 nt, Artificial Sequence
  Description of Artificial Sequence: Synthetic oligonucleotide
ugaaaagggugggaauguc

SEQ ID NO: 161273 - RNA, 19 nt, Artificial Sequence
  Description of Artificial Sequence: Synthetic oligonucleotide
ccacuggaaagaagggaca

SEQ ID NO: 161274 - RNA, 19 nt, Artificial Sequence
  Description of Artificial Sequence: Synthetic oligonucleotide
acccacgggcccuggggcu

SEQ ID NO: 161275 - RNA, 19 nt, Artificial Sequence
  Description of Artificial Sequence: Synthetic oligonucleotide
uaggucugucccgagggca

SEQ ID NO: 161276 - RNA, 19 nt, Artificial Sequence
  Description of Artificial Sequence: Synthetic oligonucleotide
accgcaugcucccggcgca

SEQ ID NO: 161277 - RNA, 19 nt, Artificial Sequence
  Description of Artificial Sequence: Synthetic oligonucleotide
agguuccuuguaaccucuu

SEQ ID NO: 161278 - RNA, 19 nt, Artificial Sequence
  Description of Artificial Sequence: Synthetic oligonucleotide
ucuuccuagguccugcacc

SEQ ID NO: 161279 - RNA, 19 nt, Artificial Sequence
  Description of Artificial Sequence: Synthetic oligonucleotide
ccagaccucacgacgcacc

SEQ ID NO: 161280 - RNA, 19 nt, Artificial Sequence
  Description of Artificial Sequence: Synthetic oligonucleotide
cuccugccucuccgcugcu

SEQ ID NO: 161281 - RNA, 19 nt, Artificial Sequence
  Description of Artificial Sequence: Synthetic oligonucleotide
uuuuggaaagucagaaaaa

SEQ ID NO: 161282 - RNA, 19 nt, Artificial Sequence
  Description of Artificial Sequence: Synthetic oligonucleotide
agaagaugucugcuucgag

SEQ ID NO: 161283 - RNA, 19 nt, Artificial Sequence
  Description of Artificial Sequence: Synthetic oligonucleotide
gggcaggaaccccauccau

SEQ ID NO: 161284 - RNA, 19 nt, Artificial Sequence
  Description of Artificial Sequence: Synthetic oligonucleotide
ugcaguagaggcgcugggc

SEQ ID NO: 161285 - RNA, 19 nt, Artificial Sequence
  Description of Artificial Sequence: Synthetic oligonucleotide
cagagagucaaggcccagc

SEQ ID NO: 161286 - RNA, 19 nt, Artificial Sequence
  Description of Artificial Sequence: Synthetic oligonucleotide
cagccaucgaccauggaug

SEQ ID NO: 161287 - RNA, 19 nt, Artificial Sequence
  Description of Artificial Sequence: Synthetic oligonucleotide
gguuuccuccaaggaaacc

SEQ ID NO: 161288 - RNA, 19 nt, Artificial Sequence
  Description of Artificial Sequence: Synthetic oligonucleotide
cggugggguugggcugggg

SEQ ID NO: 161289 - RNA, 19 nt, Artificial Sequence
  Description of Artificial Sequence: Synthetic oligonucleotide
gagggggcaccuaccuagg

SEQ ID NO: 161290 - RNA, 19 nt, Artificial Sequence
  Description of Artificial Sequence: Synthetic oligonucleotide
gaauagccacgggguagag

SEQ ID NO: 161291 - RNA, 19 nt, Artificial Sequence
  Description of Artificial Sequence: Synthetic oligonucleotide
gcuacagugauuaagagga

SEQ ID NO: 161292 - RNA, 19 nt, Artificial Sequence
  Description of Artificial Sequence: Synthetic oligonucleotide
aaagcaagggcgcgguugc

SEQ ID NO: 161293 - RNA, 19 nt, Artificial Sequence
  Description of Artificial Sequence: Synthetic oligonucleotide
cucacgccuguaaucccag

SEQ ID NO: 161294 - RNA, 19 nt, Artificial Sequence
  Description of Artificial Sequence: Synthetic oligonucleotide
gcacuuugggacaccgagg

SEQ ID NO: 161295 - RNA, 19 nt, Artificial Sequence
  Description of Artificial Sequence: Synthetic oligonucleotide
gugggcagaucacuucagg

SEQ ID NO: 161296 - RNA, 19 nt, Artificial Sequence
  Description of Artificial Sequence: Synthetic oligonucleotide
gucaggaguuugagaccag

SEQ ID NO: 161297 - RNA, 19 nt, Artificial Sequence
  Description of Artificial Sequence: Synthetic oligonucleotide
gccuggccaacuuagugaa

SEQ ID NO: 161298 - RNA, 19 nt, Artificial Sequence
  Description of Artificial Sequence: Synthetic oligonucleotide
aaccccaucucuacuaaaa

SEQ ID NO: 161299 - RNA, 19 nt, Artificial Sequence
  Description of Artificial Sequence: Synthetic oligonucleotide
aaugcaaaaauuauccagg

SEQ ID NO: 161300 - RNA, 19 nt, Artificial Sequence
  Description of Artificial Sequence: Synthetic oligonucleotide
gcaugguggcacacgccug

SEQ ID NO: 161301 - RNA, 19 nt, Artificial Sequence
  Description of Artificial Sequence: Synthetic oligonucleotide
guaaucccagcuccacagg

SEQ ID NO: 161302 - RNA, 19 nt, Artificial Sequence
  Description of Artificial Sequence: Synthetic oligonucleotide
gaggcugaggcagaauccc

SEQ ID NO: 161303 - RNA, 19 nt, Artificial Sequence
  Description of Artificial Sequence: Synthetic oligonucleotide
cuugaagcugggaggcgga

SEQ ID NO: 161304 - RNA, 19 nt, Artificial Sequence
  Description of Artificial Sequence: Synthetic oligonucleotide
agguugcagugagccgaga

SEQ ID NO: 161305 - RNA, 19 nt, Artificial Sequence
  Description of Artificial Sequence: Synthetic oligonucleotide
auugcgccauugcacucca

SEQ ID NO: 161306 - RNA, 19 nt, Artificial Sequence
  Description of Artificial Sequence: Synthetic oligonucleotide
agccugggcaacagagaaa

SEQ ID NO: 161307 - RNA, 19 nt, Artificial Sequence
  Description of Artificial Sequence: Synthetic oligonucleotide
aacaaaaaggaaaacaaau

SEQ ID NO: 161308 - RNA, 19 nt, Artificial Sequence
  Description of Artificial Sequence: Synthetic oligonucleotide
ugaugaaggucugcagaaa

SEQ ID NO: 161309 - RNA, 19 nt, Artificial Sequence
  Description of Artificial Sequence: Synthetic oligonucleotide
acugaaacccagacaugug

SEQ ID NO: 161310 - RNA, 19 nt, Artificial Sequence
  Description of Artificial Sequence: Synthetic oligonucleotide
gucugcccccucuaugugg

SEQ ID NO: 161311 - RNA, 19 nt, Artificial Sequence
  Description of Artificial Sequence: Synthetic oligonucleotide
ggcaugguuuugccagugc

SEQ ID NO: 161312 - RNA, 19 nt, Artificial Sequence
  Description of Artificial Sequence: Synthetic oligonucleotide
cuucuaagugcaggagaac

SEQ ID NO: 161313 - RNA, 19 nt, Artificial Sequence
  Description of Artificial Sequence: Synthetic oligonucleotide
caugucaccugaggcuagu

SEQ ID NO: 161314 - RNA, 19 nt, Artificial Sequence
  Description of Artificial Sequence: Synthetic oligonucleotide
uuuugcauucaggucccug

SEQ ID NO: 161315 - RNA, 19 nt, Artificial Sequence
  Description of Artificial Sequence: Synthetic oligonucleotide
ggcuucguuucuuguuggu

SEQ ID NO: 161316 - RNA, 19 nt, Artificial Sequence
  Description of Artificial Sequence: Synthetic oligonucleotide
uaugccuccccagaucguc

SEQ ID NO: 161317 - RNA, 19 nt, Artificial Sequence
  Description of Artificial Sequence: Synthetic oligonucleotide
ccuuccuguauccauguga

SEQ ID NO: 161318 - RNA, 19 nt, Artificial Sequence
  Description of Artificial Sequence: Synthetic oligonucleotide
accagacuguauuuguugg

SEQ ID NO: 161319 - RNA, 19 nt, Artificial Sequence
  Description of Artificial Sequence: Synthetic oligonucleotide
ggacugucgcagaucuugg

SEQ ID NO: 161320 - RNA, 19 nt, Artificial Sequence
  Description of Artificial Sequence: Synthetic oligonucleotide
gcuucuuacaguucuuccu

SEQ ID NO: 161321 - RNA, 19 nt, Artificial Sequence
  Description of Artificial Sequence: Synthetic oligonucleotide
uguccaaacuccauccugu

SEQ ID NO: 161322 - RNA, 19 nt, Artificial Sequence
  Description of Artificial Sequence: Synthetic oligonucleotide
ucccucaggaacgggggga

SEQ ID NO: 161323 - RNA, 19 nt, Artificial Sequence
  Description of Artificial Sequence: Synthetic oligonucleotide
aaaauucuccgaauguuuu

SEQ ID NO: 161324 - RNA, 19 nt, Artificial Sequence
  Description of Artificial Sequence: Synthetic oligonucleotide
uugguuuuuuggcugcuug

SEQ ID NO: 161325 - RNA, 19 nt, Artificial Sequence
  Description of Artificial Sequence: Synthetic oligonucleotide
ggaauuuacuucugccacc

SEQ ID NO: 161326 - RNA, 19 nt, Artificial Sequence
  Description of Artificial Sequence: Synthetic oligonucleotide
cugcuggucaucacugucc

SEQ ID NO: 161327 - RNA, 19 nt, Artificial Sequence
  Description of Artificial Sequence: Synthetic oligonucleotide
cucacuaaguggauucugg

SEQ ID NO: 161328 - RNA, 19 nt, Artificial Sequence
  Description of Artificial Sequence: Synthetic oligonucleotide
gcucccccguaccucaugg

SEQ ID NO: 161329 - RNA, 19 nt, Artificial Sequence
  Description of Artificial Sequence: Synthetic oligonucleotide
gcucaaacuaccacuccuc

SEQ ID NO: 161330 - RNA, 19 nt, Artificial Sequence
  Description of Artificial Sequence: Synthetic oligonucleotide
cagucgcuauauuaaagcu

SEQ ID NO: 161331 - RNA, 19 nt, Artificial Sequence
  Description of Artificial Sequence: Synthetic oligonucleotide
uuauauuuugcuggauuac

SEQ ID NO: 161332 - RNA, 19 nt, Artificial Sequence
  Description of Artificial Sequence: Synthetic oligonucleotide
cugcuaaauacaaaagaaa

SEQ ID NO: 161333 - RNA, 19 nt, Artificial Sequence
  Description of Artificial Sequence: Synthetic oligonucleotide
aguucaauauguuuucauu

SEQ ID NO: 161334 - RNA, 19 nt, Artificial Sequence
  Description of Artificial Sequence: Synthetic oligonucleotide
uucuguagggaaaauggga

SEQ ID NO: 161335 - RNA, 19 nt, Artificial Sequence
  Description of Artificial Sequence: Synthetic oligonucleotide
auugcugcuuuaaauuucu

SEQ ID NO: 161336 - RNA, 19 nt, Artificial Sequence
  Description of Artificial Sequence: Synthetic oligonucleotide
ugagcuagggauuuuuugg

SEQ ID NO: 161337 - RNA, 19 nt, Artificial Sequence
  Description of Artificial Sequence: Synthetic oligonucleotide
gcagcugcaguguuggcga

SEQ ID NO: 161338 - RNA, 19 nt, Artificial Sequence
  Description of Artificial Sequence: Synthetic oligonucleotide
acuauuguaaaauucucuu

SEQ ID NO: 161339 - RNA, 19 nt, Artificial Sequence
  Description of Artificial Sequence: Synthetic oligonucleotide
uuguuucucucuguaaaua

SEQ ID NO: 161340 - RNA, 19 nt, Artificial Sequence
  Description of Artificial Sequence: Synthetic oligonucleotide
agcaccugcuaacauuaca

SEQ ID NO: 161341 - RNA, 19 nt, Artificial Sequence
  Description of Artificial Sequence: Synthetic oligonucleotide
aauuuguauuuauguuuaa

SEQ ID NO: 161342 - RNA, 19 nt, Artificial Sequence
  Description of Artificial Sequence: Synthetic oligonucleotide
aagaaggcaucauuuggug

SEQ ID NO: 161343 - RNA, 19 nt, Artificial Sequence
  Description of Artificial Sequence: Synthetic oligonucleotide
gaacagaacuaggaaauga

SEQ ID NO: 161344 - RNA, 19 nt, Artificial Sequence
  Description of Artificial Sequence: Synthetic oligonucleotide
aauuuuuagcucuuaaaag

SEQ ID NO: 161345 - RNA, 19 nt, Artificial Sequence
  Description of Artificial Sequence: Synthetic oligonucleotide
gcauuugcuuugagaccgc

SEQ ID NO: 161346 - RNA, 19 nt, Artificial Sequence
  Description of Artificial Sequence: Synthetic oligonucleotide
cacaggagugucuuuccuu

SEQ ID NO: 161347 - RNA, 19 nt, Artificial Sequence
  Description of Artificial Sequence: Synthetic oligonucleotide
uguaaaacagugaugauaa

SEQ ID NO: 161348 - RNA, 19 nt, Artificial Sequence
  Description of Artificial Sequence: Synthetic oligonucleotide
auuucugccuuggcccuac

SEQ ID NO: 161349 - RNA, 19 nt, Artificial Sequence
  Description of Artificial Sequence: Synthetic oligonucleotide
ccuugaagcaauguugugu

SEQ ID NO: 161350 - RNA, 19 nt, Artificial Sequence
  Description of Artificial Sequence: Synthetic oligonucleotide
ugaagggaugaagaaucua

SEQ ID NO: 161351 - RNA, 19 nt, Artificial Sequence
  Description of Artificial Sequence: Synthetic oligonucleotide
aaaagucuucauaaguccu

SEQ ID NO: 161352 - RNA, 19 nt, Artificial Sequence
  Description of Artificial Sequence: Synthetic oligonucleotide
uugggagaggugcuagaaa

SEQ ID NO: 161353 - RNA, 19 nt, Artificial Sequence
  Description of Artificial Sequence: Synthetic oligonucleotide
aaauauaaggcacuaucau

SEQ ID NO: 161354 - RNA, 19 nt, Artificial Sequence
  Description of Artificial Sequence: Synthetic oligonucleotide
uaauuacagugauguccuu

SEQ ID NO: 161355 - RNA, 19 nt, Artificial Sequence
  Description of Artificial Sequence: Synthetic oligonucleotide
ugcuguuacuacucaaauc

SEQ ID NO: 161356 - RNA, 19 nt, Artificial Sequence
  Description of Artificial Sequence: Synthetic oligonucleotide
cacccacaaauuuccccaa

SEQ ID NO: 161357 - RNA, 19 nt, Artificial Sequence
  Description of Artificial Sequence: Synthetic oligonucleotide
aagacugcgcuagcuguca

SEQ ID NO: 161358 - RNA, 19 nt, Artificial Sequence
  Description of Artificial Sequence: Synthetic oligonucleotide
aaauaaaagacagugaaau

SEQ ID NO: 161359 - RNA, 19 nt, Artificial Sequence
  Description of Artificial Sequence: Synthetic oligonucleotide
aacaccaaaccaaaccgua

SEQ ID NO: 161360 - RNA, 19 nt, Artificial Sequence
  Description of Artificial Sequence: Synthetic oligonucleotide
augcccguagcuccauauu

SEQ ID NO: 161361 - RNA, 19 nt, Artificial Sequence
  Description of Artificial Sequence: Synthetic oligonucleotide
uggacauccccagaaaaga

SEQ ID NO: 161362 - RNA, 19 nt, Artificial Sequence
  Description of Artificial Sequence: Synthetic oligonucleotide
auggaaaagaaauugcaug

SEQ ID NO: 161363 - RNA, 19 nt, Artificial Sequence
  Description of Artificial Sequence: Synthetic oligonucleotide
gcagugccggcugccaaga

SEQ ID NO: 161364 - RNA, 19 nt, Artificial Sequence
  Description of Artificial Sequence: Synthetic oligonucleotide
acagugaaguucaaaugcc

SEQ ID NO: 161365 - RNA, 19 nt, Artificial Sequence
  Description of Artificial Sequence: Synthetic oligonucleotide
ccuuccagugggaccccaa

SEQ ID NO: 161366 - RNA, 19 nt, Artificial Sequence
  Description of Artificial Sequence: Synthetic oligonucleotide
aaccccacacugcgcuggu

SEQ ID NO: 161367 - RNA, 19 nt, Artificial Sequence
  Description of Artificial Sequence: Synthetic oligonucleotide
uugaaaaauggcaaagaau

SEQ ID NO: 161368 - RNA, 19 nt, Artificial Sequence
  Description of Artificial Sequence: Synthetic oligonucleotide
uucaaaccugaccacagaa

SEQ ID NO: 161369 - RNA, 19 nt, Artificial Sequence
  Description of Artificial Sequence: Synthetic oligonucleotide
auuggaggcuacaaggucc

SEQ ID NO: 161370 - RNA, 19 nt, Artificial Sequence
  Description of Artificial Sequence: Synthetic oligonucleotide
cguuaugccaccuggagca

SEQ ID NO: 161371 - RNA, 19 nt, Artificial Sequence
  Description of Artificial Sequence: Synthetic oligonucleotide
aucauaauggacucugugg

SEQ ID NO: 161372 - RNA, 19 nt, Artificial Sequence
  Description of Artificial Sequence: Synthetic oligonucleotide
gugcccucugacaagggca

SEQ ID NO: 161373 - RNA, 19 nt, Artificial Sequence
  Description of Artificial Sequence: Synthetic oligonucleotide
aacuacaccugcauugugg

SEQ ID NO: 161374 - RNA, 19 nt, Artificial Sequence
  Description of Artificial Sequence: Synthetic oligonucleotide
gagaaugaguacggcagca

SEQ ID NO: 161375 - RNA, 19 nt, Artificial Sequence
  Description of Artificial Sequence: Synthetic oligonucleotide
aucaaccacacauaccagc

SEQ ID NO: 161376 - RNA, 19 nt, Artificial Sequence
  Description of Artificial Sequence: Synthetic oligonucleotide
cuggaugucguggagcggu

SEQ ID NO: 161377 - RNA, 19 nt, Artificial Sequence
  Description of Artificial Sequence: Synthetic oligonucleotide
uccccucaccggcccaucc

SEQ ID NO: 161378 - RNA, 19 nt, Artificial Sequence
  Description of Artificial Sequence: Synthetic oligonucleotide
cugcaagcaggguugcccg

SEQ ID NO: 161379 - RNA, 19 nt, Artificial Sequence
  Description of Artificial Sequence: Synthetic oligonucleotide
gccaacaaaacaguggccc

SEQ ID NO: 161380 - RNA, 19 nt, Artificial Sequence
  Description of Artificial Sequence: Synthetic oligonucleotide
cuggguagcaacguggagu

SEQ ID NO: 161381 - RNA, 19 nt, Artificial Sequence
  Description of Artificial Sequence: Synthetic oligonucleotide
uucauguguaagguguaca

SEQ ID NO: 161382 - RNA, 19 nt, Artificial Sequence
  Description of Artificial Sequence: Synthetic oligonucleotide
agugacccgcagccgcaca

SEQ ID NO: 161383 - RNA, 19 nt, Artificial Sequence
  Description of Artificial Sequence: Synthetic oligonucleotide
auccaguggcuaaagcaca

SEQ ID NO: 161384 - RNA, 19 nt, Artificial Sequence
  Description of Artificial Sequence: Synthetic oligonucleotide
aucgaggugaaugggagca

SEQ ID NO: 161385 - RNA, 19 nt, Artificial Sequence
  Description of Artificial Sequence: Synthetic oligonucleotide
aagauuggcccagacaacc

SEQ ID NO: 161386 - RNA, 19 nt, Artificial Sequence
  Description of Artificial Sequence: Synthetic oligonucleotide
cugccuuauguccagaucu

SEQ ID NO: 161387 - RNA, 19 nt, Artificial Sequence
  Description of Artificial Sequence: Synthetic oligonucleotide
uugaagacugcuggaguua

SEQ ID NO: 161388 - RNA, 19 nt, Artificial Sequence
  Description of Artificial Sequence: Synthetic oligonucleotide
aauaccaccgacaaagaga

SEQ ID NO: 161389 - RNA, 19 nt, Artificial Sequence
  Description of Artificial Sequence: Synthetic oligonucleotide
auggaggugcuucacuuaa

SEQ ID NO: 161390 - RNA, 19 nt, Artificial Sequence
  Description of Artificial Sequence: Synthetic oligonucleotide
agaaaugucuccuuugagg

SEQ ID NO: 161391 - RNA, 19 nt, Artificial Sequence
  Description of Artificial Sequence: Synthetic oligonucleotide
gacgcaggggaguauacgu

SEQ ID NO: 161392 - RNA, 19 nt, Artificial Sequence
  Description of Artificial Sequence: Synthetic oligonucleotide
ugcuuggcggguaacucua

SEQ ID NO: 161393 - RNA, 19 nt, Artificial Sequence
  Description of Artificial Sequence: Synthetic oligonucleotide
aucggacucucccaucacu

SEQ ID NO: 161394 - RNA, 19 nt, Artificial Sequence
  Description of Artificial Sequence: Synthetic oligonucleotide
ucugcaugguugaccguuc

SEQ ID NO: 161395 - RNA, 19 nt, Artificial Sequence
  Description of Artificial Sequence: Synthetic oligonucleotide
cuggaagcccuggaagaga

SEQ ID NO: 161396 - RNA, 19 nt, Artificial Sequence
  Description of Artificial Sequence: Synthetic oligonucleotide
aggccggcagugaugaccu

SEQ ID NO: 161397 - RNA, 19 nt, Artificial Sequence
  Description of Artificial Sequence: Synthetic oligonucleotide
ucgccccuguaccuggaga

SEQ ID NO: 161398 - RNA, 19 nt, Artificial Sequence
  Description of Artificial Sequence: Synthetic oligonucleotide
aucaucaucuauugcacag

SEQ ID NO: 161399 - RNA, 19 nt, Artificial Sequence
  Description of Artificial Sequence: Synthetic oligonucleotide
ggggccuuccucaucuccu

SEQ ID NO: 161400 - RNA, 19 nt, Artificial Sequence
  Description of Artificial Sequence: Synthetic oligonucleotide
ugcaugguggggucgguca

SEQ ID NO: 161401 - RNA, 19 nt, Artificial Sequence
  Description of Artificial Sequence: Synthetic oligonucleotide
aucgucuacaagaugaaga

SEQ ID NO: 161402 - RNA, 19 nt, Artificial Sequence
  Description of Artificial Sequence: Synthetic oligonucleotide
agugguaccaagaagagug

SEQ ID NO: 161403 - RNA, 19 nt, Artificial Sequence
  Description of Artificial Sequence: Synthetic oligonucleotide
gacuuccacagccagaugg

SEQ ID NO: 161404 - RNA, 19 nt, Artificial Sequence
  Description of Artificial Sequence: Synthetic oligonucleotide
gcugugcacaagcuggcca

SEQ ID NO: 161405 - RNA, 19 nt, Artificial Sequence
  Description of Artificial Sequence: Synthetic oligonucleotide
aagagcaucccucugcgca

SEQ ID NO: 161406 - RNA, 19 nt, Artificial Sequence
  Description of Artificial Sequence: Synthetic oligonucleotide
agacagguaacagugucug

SEQ ID NO: 161407 - RNA, 19 nt, Artificial Sequence
  Description of Artificial Sequence: Synthetic oligonucleotide
gcugacuccagugcaucca

SEQ ID NO: 161408 - RNA, 19 nt, Artificial Sequence
  Description of Artificial Sequence: Synthetic oligonucleotide
augaacucugggguucuuc

SEQ ID NO: 161409 - RNA, 19 nt, Artificial Sequence
  Description of Artificial Sequence: Synthetic oligonucleotide
cugguucggccaucacggc

SEQ ID NO: 161410 - RNA, 19 nt, Artificial Sequence
  Description of Artificial Sequence: Synthetic oligonucleotide
cucuccuccagugggacuc

SEQ ID NO: 161411 - RNA, 19 nt, Artificial Sequence
  Description of Artificial Sequence: Synthetic oligonucleotide
cccaugcuagcaggggucu

SEQ ID NO: 161412 - RNA, 19 nt, Artificial Sequence
  Description of Artificial Sequence: Synthetic oligonucleotide
ucugaguaugagcuucccg

SEQ ID NO: 161413 - RNA, 19 nt, Artificial Sequence
  Description of Artificial Sequence: Synthetic oligonucleotide
gaagacccucgcugggagc

SEQ ID NO: 161414 - RNA, 19 nt, Artificial Sequence
  Description of Artificial Sequence: Synthetic oligonucleotide
cugccucgggacagacugg

SEQ ID NO: 161415 - RNA, 19 nt, Artificial Sequence
  Description of Artificial Sequence: Synthetic oligonucleotide
gucuuaggcaaaccccugg

SEQ ID NO: 161416 - RNA, 19 nt, Artificial Sequence
  Description of Artificial Sequence: Synthetic oligonucleotide
ggagagggcugcuuugggc

SEQ ID NO: 161417 - RNA, 19 nt, Artificial Sequence
  Description of Artificial Sequence: Synthetic oligonucleotide
caggugguguuggcagagg

SEQ ID NO: 161418 - RNA, 19 nt, Artificial Sequence
  Description of Artificial Sequence: Synthetic oligonucleotide
gcuaucgggcuggacaagg

SEQ ID NO: 161419 - RNA, 19 nt, Artificial Sequence
  Description of Artificial Sequence: Synthetic oligonucleotide
gacaaacccaaccguguga

SEQ ID NO: 161420 - RNA, 19 nt, Artificial Sequence
  Description of Artificial Sequence: Synthetic oligonucleotide
accaaaguggcugugaaga

SEQ ID NO: 161421 - RNA, 19 nt, Artificial Sequence
  Description of Artificial Sequence: Synthetic oligonucleotide
auguugaagucggacgcaa

SEQ ID NO: 161422 - RNA, 19 nt, Artificial Sequence
  Description of Artificial Sequence: Synthetic oligonucleotide
acagagaaagacuugucag

SEQ ID NO: 161423 - RNA, 19 nt, Artificial Sequence
  Description of Artificial Sequence: Synthetic oligonucleotide
gaccugaucucagaaaugg

SEQ ID NO: 161424 - RNA, 19 nt, Artificial Sequence
  Description of Artificial Sequence: Synthetic oligonucleotide
gagaugaugaagaugaucg

SEQ ID NO: 161425 - RNA, 19 nt, Artificial Sequence
  Description of Artificial Sequence: Synthetic oligonucleotide
gggaagcauaagaauauca

SEQ ID NO: 161426 - RNA, 19 nt, Artificial Sequence
  Description of Artificial Sequence: Synthetic oligonucleotide
aucaaccugcugggggccu

SEQ ID NO: 161427 - RNA, 19 nt, Artificial Sequence
  Description of Artificial Sequence: Synthetic oligonucleotide
ugcacgcaggauggucccu

SEQ ID NO: 161428 - RNA, 19 nt, Artificial Sequence
  Description of Artificial Sequence: Synthetic oligonucleotide
uuguaugucaucguggagu

SEQ ID NO: 161429 - RNA, 19 nt, Artificial Sequence
  Description of Artificial Sequence: Synthetic oligonucleotide
uaugccuccaagggcaacc

SEQ ID NO: 161430 - RNA, 19 nt, Artificial Sequence
  Description of Artificial Sequence: Synthetic oligonucleotide
cugcgggaguaccugcagg

SEQ ID NO: 161431 - RNA, 19 nt, Artificial Sequence
  Description of Artificial Sequence: Synthetic oligonucleotide
gcccggaggcccccagggc

SEQ ID NO: 161432 - RNA, 19 nt, Artificial Sequence
  Description of Artificial Sequence: Synthetic oligonucleotide
cuggaauacugcuacaacc

SEQ ID NO: 161433 - RNA, 19 nt, Artificial Sequence
  Description of Artificial Sequence: Synthetic oligonucleotide
cccagccacaacccagagg

SEQ ID NO: 161434 - RNA, 19 nt, Artificial Sequence
  Description of Artificial Sequence: Synthetic oligonucleotide
gagcagcucuccuccaagg

SEQ ID NO: 161435 - RNA, 19 nt, Artificial Sequence
  Description of Artificial Sequence: Synthetic oligonucleotide
gaccugguguccugcgccu

SEQ ID NO: 161436 - RNA, 19 nt, Artificial Sequence
  Description of Artificial Sequence: Synthetic oligonucleotide
uaccagguggcccgaggca

SEQ ID NO: 161437 - RNA, 19 nt, Artificial Sequence
  Description of Artificial Sequence: Synthetic oligonucleotide
auggaguaucuggccucca

SEQ ID NO: 161438 - RNA, 19 nt, Artificial Sequence
  Description of Artificial Sequence: Synthetic oligonucleotide
aagaagugcauacaccgag

SEQ ID NO: 161439 - RNA, 19 nt, Artificial Sequence
  Description of Artificial Sequence: Synthetic oligonucleotide
gaccuggcagccaggaaug

SEQ ID NO: 161440 - RNA, 19 nt, Artificial Sequence
  Description of Artificial Sequence: Synthetic oligonucleotide
guccuggugacagaggaca

SEQ ID NO: 161441 - RNA, 19 nt, Artificial Sequence
  Description of Artificial Sequence: Synthetic oligonucleotide
aaugugaugaagauagcag

SEQ ID NO: 161442 - RNA, 19 nt, Artificial Sequence
  Description of Artificial Sequence: Synthetic oligonucleotide
gacuuuggccucgcacggg

SEQ ID NO: 161443 - RNA, 19 nt, Artificial Sequence
  Description of Artificial Sequence: Synthetic oligonucleotide
gacauucaccacaucgacu

SEQ ID NO: 161444 - RNA, 19 nt, Artificial Sequence
  Description of Artificial Sequence: Synthetic oligonucleotide
uacuauaaaaagacaacca

SEQ ID NO: 161445 - RNA, 19 nt, Artificial Sequence
  Description of Artificial Sequence: Synthetic oligonucleotide
aacggccgacugccuguga

SEQ ID NO: 161446 - RNA, 19 nt, Artificial Sequence
  Description of Artificial Sequence: Synthetic oligonucleotide
aaguggauggcacccgagg

SEQ ID NO: 161447 - RNA, 19 nt, Artificial Sequence
  Description of Artificial Sequence: Synthetic oligonucleotide
gcauuauuugaccggaucu

SEQ ID NO: 161448 - RNA, 19 nt, Artificial Sequence
  Description of Artificial Sequence: Synthetic oligonucleotide
uacacccaccagagugaug

SEQ ID NO: 161449 - RNA, 19 nt, Artificial Sequence
  Description of Artificial Sequence: Synthetic oligonucleotide
guguggucuuucggggugc

SEQ ID NO: 161450 - RNA, 19 nt, Artificial Sequence
  Description of Artificial Sequence: Synthetic oligonucleotide
cuccugugggagaucuuca

SEQ ID NO: 161451 - RNA, 19 nt, Artificial Sequence
  Description of Artificial Sequence: Synthetic oligonucleotide
acucugggcggcuccccau

SEQ ID NO: 161452 - RNA, 19 nt, Artificial Sequence
  Description of Artificial Sequence: Synthetic oligonucleotide
uaccccggugugccugugg

SEQ ID NO: 161453 - RNA, 19 nt, Artificial Sequence
  Description of Artificial Sequence: Synthetic oligonucleotide
gaggaacuuuucaagcugc

SEQ ID NO: 161454 - RNA, 19 nt, Artificial Sequence
  Description of Artificial Sequence: Synthetic oligonucleotide
cugaaggagggucaccgca

SEQ ID NO: 161455 - RNA, 19 nt, Artificial Sequence
  Description of Artificial Sequence: Synthetic oligonucleotide
auggacaagcccaguaacu

SEQ ID NO: 161456 - RNA, 19 nt, Artificial Sequence
  Description of Artificial Sequence: Synthetic oligonucleotide
ugcaccaacgagcuguaca

SEQ ID NO: 161457 - RNA, 19 nt, Artificial Sequence
  Description of Artificial Sequence: Synthetic oligonucleotide
augaugaugcgggacugcu

SEQ ID NO: 161458 - RNA, 19 nt, Artificial Sequence
  Description of Artificial Sequence: Synthetic oligonucleotide
uggcaugcagugcccucac

SEQ ID NO: 161459 - RNA, 19 nt, Artificial Sequence
  Description of Artificial Sequence: Synthetic oligonucleotide
cagagacccaccuucaagc

SEQ ID NO: 161460 - RNA, 19 nt, Artificial Sequence
  Description of Artificial Sequence: Synthetic oligonucleotide
cagcugguggaagaccugg

SEQ ID NO: 161461 - RNA, 19 nt, Artificial Sequence
  Description of Artificial Sequence: Synthetic oligonucleotide
gaccgcaucguggccuuga

SEQ ID NO: 161462 - RNA, 19 nt, Artificial Sequence
  Description of Artificial Sequence: Synthetic oligonucleotide
accuccaaccaggaguacc

SEQ ID NO: 161463 - RNA, 19 nt, Artificial Sequence
  Description of Artificial Sequence: Synthetic oligonucleotide
cuggaccuguccaugcccc

SEQ ID NO: 161464 - RNA, 19 nt, Artificial Sequence
  Description of Artificial Sequence: Synthetic oligonucleotide
cuggaccaguacuccccca

SEQ ID NO: 161465 - RNA, 19 nt, Artificial Sequence
  Description of Artificial Sequence: Synthetic oligonucleotide
agcuuucccgacacccgga

SEQ ID NO: 161466 - RNA, 19 nt, Artificial Sequence
  Description of Artificial Sequence: Synthetic oligonucleotide
agcucuacgugcuccucag

SEQ ID NO: 161467 - RNA, 19 nt, Artificial Sequence
  Description of Artificial Sequence: Synthetic oligonucleotide
ggggaggauuccgucuucu

SEQ ID NO: 161468 - RNA, 19 nt, Artificial Sequence
  Description of Artificial Sequence: Synthetic oligonucleotide
ucucaugagccgcugcccg

SEQ ID NO: 161469 - RNA, 19 nt, Artificial Sequence
  Description of Artificial Sequence: Synthetic oligonucleotide
gaggagcccugccugcccc

SEQ ID NO: 161470 - RNA, 19 nt, Artificial Sequence
  Description of Artificial Sequence: Synthetic oligonucleotide
cgacacccagcccagcuug

SEQ ID NO: 161471 - RNA, 19 nt, Artificial Sequence
  Description of Artificial Sequence: Synthetic oligonucleotide
gccaauggcggacucaaac

SEQ ID NO: 161472 - RNA, 19 nt, Artificial Sequence
  Description of Artificial Sequence: Synthetic oligonucleotide
cgccgcugacugccaccca

SEQ ID NO: 161473 - RNA, 19 nt, Artificial Sequence
  Description of Artificial Sequence: Synthetic oligonucleotide
acacgcccuccccagacuc

SEQ ID NO: 161474 - RNA, 19 nt, Artificial Sequence
  Description of Artificial Sequence: Synthetic oligonucleotide
ccaccgucagcuguaaccc

SEQ ID NO: 161475 - RNA, 19 nt, Artificial Sequence
  Description of Artificial Sequence: Synthetic oligonucleotide
cucacccacagccccugcu

SEQ ID NO: 161476 - RNA, 19 nt, Artificial Sequence
  Description of Artificial Sequence: Synthetic oligonucleotide
ugggcccaccaccuguccg

SEQ ID NO: 161477 - RNA, 19 nt, Artificial Sequence
  Description of Artificial Sequence: Synthetic oligonucleotide
gucccuguccccuuuccug

SEQ ID NO: 161478 - RNA, 19 nt, Artificial Sequence
  Description of Artificial Sequence: Synthetic oligonucleotide
gcuggcaggagccggcugc

SEQ ID NO: 161479 - RNA, 19 nt, Artificial Sequence
  Description of Artificial Sequence: Synthetic oligonucleotide
ccuaccaggggccuuccug

SEQ ID NO: 161480 - RNA, 19 nt, Artificial Sequence
  Description of Artificial Sequence: Synthetic oligonucleotide
guguggccugccuucaccc

SEQ ID NO: 161481 - RNA, 19 nt, Artificial Sequence
  Description of Artificial Sequence: Synthetic oligonucleotide
ccacucagcucaccucucc

SEQ ID NO: 161482 - RNA, 19 nt, Artificial Sequence
  Description of Artificial Sequence: Synthetic oligonucleotide
ccuccaccuccucuccacc

SEQ ID NO: 161483 - RNA, 19 nt, Artificial Sequence
  Description of Artificial Sequence: Synthetic oligonucleotide
cugcuggugagaggugcaa

SEQ ID NO: 161484 - RNA, 19 nt, Artificial Sequence
  Description of Artificial Sequence: Synthetic oligonucleotide
aagaggcagaucuuugcug

SEQ ID NO: 161485 - RNA, 19 nt, Artificial Sequence
  Description of Artificial Sequence: Synthetic oligonucleotide
gccagccacuucauccccu

SEQ ID NO: 161486 - RNA, 19 nt, Artificial Sequence
  Description of Artificial Sequence: Synthetic oligonucleotide
ucccagauguuggaccaac

SEQ ID NO: 161487 - RNA, 19 nt, Artificial Sequence
  Description of Artificial Sequence: Synthetic oligonucleotide
caccccucccugccaccag

SEQ ID NO: 161488 - RNA, 19 nt, Artificial Sequence
  Description of Artificial Sequence: Synthetic oligonucleotide
ggcacugccuggagggcag

SEQ ID NO: 161489 - RNA, 19 nt, Artificial Sequence
  Description of Artificial Sequence: Synthetic oligonucleotide
gggagugggagccaaugaa

SEQ ID NO: 161490 - RNA, 19 nt, Artificial Sequence
  Description of Artificial Sequence: Synthetic oligonucleotide
acaggcaugcaagugagag

SEQ ID NO: 161491 - RNA, 19 nt, Artificial Sequence
  Description of Artificial Sequence: Synthetic oligonucleotide
gcuuccugagcuuucuccu

SEQ ID NO: 161492 - RNA, 19 nt, Artificial Sequence
  Description of Artificial Sequence: Synthetic oligonucleotide
ugucgguuuggucuguuuu

SEQ ID NO: 161493 - RNA, 19 nt, Artificial Sequence
  Description of Artificial Sequence: Synthetic oligonucleotide
ugccuucacccauaagccc

SEQ ID NO: 161494 - RNA, 19 nt, Artificial Sequence
  Description of Artificial Sequence: Synthetic oligonucleotide
ccucgcacucugguggcag

SEQ ID NO: 161495 - RNA, 19 nt, Artificial Sequence
  Description of Artificial Sequence: Synthetic oligonucleotide
ggugccuuguccucagggc

SEQ ID NO: 161496 - RNA, 19 nt, Artificial Sequence
  Description of Artificial Sequence: Synthetic oligonucleotide
cuacagcaguagggagguc

SEQ ID NO: 161497 - RNA, 19 nt, Artificial Sequence
  Description of Artificial Sequence: Synthetic oligonucleotide
cagugcuucgugccucgau

SEQ ID NO: 161498 - RNA, 19 nt, Artificial Sequence
  Description of Artificial Sequence: Synthetic oligonucleotide
uugaaggugaccucugccc

SEQ ID NO: 161499 - RNA, 19 nt, Artificial Sequence
  Description of Artificial Sequence: Synthetic oligonucleotide
ccagauagguggugccagu

SEQ ID NO: 161500 - RNA, 19 nt, Artificial Sequence
  Description of Artificial Sequence: Synthetic oligonucleotide
uggcuuauuaauuccgaua

SEQ ID NO: 161501 - RNA, 19 nt, Artificial Sequence
  Description of Artificial Sequence: Synthetic oligonucleotide
acuaguuugcuuugcugac

SEQ ID NO: 161502 - RNA, 19 nt, Artificial Sequence
  Description of Artificial Sequence: Synthetic oligonucleotide
ccaaaugccugguaccaga

SEQ ID NO: 161503 - RNA, 19 nt, Artificial Sequence
  Description of Artificial Sequence: Synthetic oligonucleotide
aggauggugaggcgaaggc

SEQ ID NO: 161504 - RNA, 19 nt, Artificial Sequence
  Description of Artificial Sequence: Synthetic oligonucleotide
ccagguugggggcaguguu

SEQ ID NO: 161505 - RNA, 19 nt, Artificial Sequence
  Description of Artificial Sequence: Synthetic oligonucleotide
uguggcccuggggcccagc

SEQ ID NO: 161506 - RNA, 19 nt, Artificial Sequence
  Description of Artificial Sequence: Synthetic oligonucleotide
ccccaaacugggggcucug

SEQ ID NO: 161507 - RNA, 19 nt, Artificial Sequence
  Description of Artificial Sequence: Synthetic oligonucleotide
guauauagcuaugaagaaa

SEQ ID NO: 161508 - RNA, 19 nt, Artificial Sequence
  Description of Artificial Sequence: Synthetic oligonucleotide
aacacaaaguguauaaauc

SEQ ID NO: 161509 - RNA, 19 nt, Artificial Sequence
  Description of Artificial Sequence: Synthetic oligonucleotide
cugaguauauauuuacaug

SEQ ID NO: 161510 - RNA, 19 nt, Artificial Sequence
  Description of Artificial Sequence: Synthetic oligonucleotide
gucuuuuuaaaagggucgu

SEQ ID NO: 161511 - RNA, 19 nt, Artificial Sequence
  Description of Artificial Sequence: Synthetic oligonucleotide
uuaccagagauuuacccau

SEQ ID NO: 161512 - RNA, 19 nt, Artificial Sequence
  Description of Artificial Sequence: Synthetic oligonucleotide
ucggguaagaugcuccugg

SEQ ID NO: 161513 - RNA, 19 nt, Artificial Sequence
  Description of Artificial Sequence: Synthetic oligonucleotide
guggcugggaggcaucagu

SEQ ID NO: 161514 - RNA, 19 nt, Artificial Sequence
  Description of Artificial Sequence: Synthetic oligonucleotide
uugcuauauauuaaaaaca

SEQ ID NO: 161515 - RNA, 19 nt, Artificial Sequence
  Description of Artificial Sequence: Synthetic oligonucleotide
aaaaaagaaaaaaaaggaa

SEQ ID NO: 161516 - RNA, 19 nt, Artificial Sequence
  Description of Artificial Sequence: Synthetic oligonucleotide
aaauguuuuuaaaaagguc

SEQ ID NO: 161517 - RNA, 19 nt, Artificial Sequence
  Description of Artificial Sequence: Synthetic oligonucleotide
cauauauuuuuugcuacuu

SEQ ID NO: 161518 - RNA, 19 nt, Artificial Sequence
  Description of Artificial Sequence: Synthetic oligonucleotide
uuugcuguuuuauuuuuuu

SEQ ID NO: 161519 - RNA, 19 nt, Artificial Sequence
  Description of Artificial Sequence: Synthetic oligonucleotide
uaaauuauguucuaaaccu

SEQ ID NO: 161520 - RNA, 19 nt, Artificial Sequence
  Description of Artificial Sequence: Synthetic oligonucleotide
uauuuucaguuuagguccc

SEQ ID NO: 161521 - RNA, 19 nt, Artificial Sequence
  Description of Artificial Sequence: Synthetic oligonucleotide
cucaauaaaaauugcugcu

SEQ ID NO: 161522 - RNA, 19 nt, Artificial Sequence
  Description of Artificial Sequence: Synthetic oligonucleotide
ugcuucauuuaucuauggg

SEQ ID NO: 161523 - RNA, 19 nt, Artificial Sequence
  Description of Artificial Sequence: Synthetic oligonucleotide
gcuguaugaaaaggguggg

SEQ ID NO: 161524 - RNA, 19 nt, Artificial Sequence
  Description of Artificial Sequence: Synthetic oligonucleotide
gaauguccacuggaaagaa

SEQ ID NO: 161525 - RNA, 19 nt, Artificial Sequence
  Description of Artificial Sequence: Synthetic oligonucleotide
agggacacccacgggcccu

SEQ ID NO: 161526 - RNA, 19 nt, Artificial Sequence
  Description of Artificial Sequence: Synthetic oligonucleotide
uggggcuaggucugucccg

SEQ ID NO: 161527 - RNA, 19 nt, Artificial Sequence
  Description of Artificial Sequence: Synthetic oligonucleotide
gagggcaccgcaugcuccc

SEQ ID NO: 161528 - RNA, 19 nt, Artificial Sequence
  Description of Artificial Sequence: Synthetic oligonucleotide
cggcgcagguuccuuguaa

SEQ ID NO: 161529 - RNA, 19 nt, Artificial Sequence
  Description of Artificial Sequence: Synthetic oligonucleotide
accucuucuuccuaggucc

SEQ ID NO: 161530 - RNA, 19 nt, Artificial Sequence
  Description of Artificial Sequence: Synthetic oligonucleotide
cugcacccagaccucacga

SEQ ID NO: 161531 - RNA, 19 nt, Artificial Sequence
  Description of Artificial Sequence: Synthetic oligonucleotide
acgcaccuccugccucucc

SEQ ID NO: 161532 - RNA, 19 nt, Artificial Sequence
  Description of Artificial Sequence: Synthetic oligonucleotide
cgcugcuuuuggaaaguca

SEQ ID NO: 161533 - RNA, 19 nt, Artificial Sequence
  Description of Artificial Sequence: Synthetic oligonucleotide
agaaaaagaagaugucugc

SEQ ID NO: 161534 - RNA, 19 nt, Artificial Sequence
  Description of Artificial Sequence: Synthetic oligonucleotide
cuucgagggcaggaacccc

SEQ ID NO: 161535 - RNA, 19 nt, Artificial Sequence
  Description of Artificial Sequence: Synthetic oligonucleotide
cauccaugcaguagaggcg

SEQ ID NO: 161536 - RNA, 19 nt, Artificial Sequence
  Description of Artificial Sequence: Synthetic oligonucleotide
gcugggcagagagucaagg

SEQ ID NO: 161537 - RNA, 19 nt, Artificial Sequence
  Description of Artificial Sequence: Synthetic oligonucleotide
gcccagcagccaucgacca

SEQ ID NO: 161538 - RNA, 19 nt, Artificial Sequence
  Description of Artificial Sequence: Synthetic oligonucleotide
auggaugguuuccuccaag

SEQ ID NO: 161539 - RNA, 19 nt, Artificial Sequence
  Description of Artificial Sequence: Synthetic oligonucleotide
ggaaaccggugggguuggg

SEQ ID NO: 161540 - RNA, 19 nt, Artificial Sequence
  Description of Artificial Sequence: Synthetic oligonucleotide
gcuggggagggggcaccua

SEQ ID NO: 161541 - RNA, 19 nt, Artificial Sequence
  Description of Artificial Sequence: Synthetic oligonucleotide
accuaggaauagccacggg

SEQ ID NO: 161542 - RNA, 19 nt, Artificial Sequence
  Description of Artificial Sequence: Synthetic oligonucleotide
gguagagcuacagugauua

SEQ ID NO: 161543 - RNA, 19 nt, Artificial Sequence
  Description of Artificial Sequence: Synthetic oligonucleotide
aagaggaaagcaagggcgc

SEQ ID NO: 161544 - RNA, 19 nt, Artificial Sequence
  Description of Artificial Sequence: Synthetic oligonucleotide
cgguugcucacgccuguaa

SEQ ID NO: 161545 - RNA, 19 nt, Artificial Sequence
  Description of Artificial Sequence: Synthetic oligonucleotide
aucccagcacuuugggaca

SEQ ID NO: 161546 - RNA, 19 nt, Artificial Sequence
  Description of Artificial Sequence: Synthetic oligonucleotide
accgaggugggcagaucac

SEQ ID NO: 161547 - RNA, 19 nt, Artificial Sequence
  Description of Artificial Sequence: Synthetic oligonucleotide
cuucaggucaggaguuuga

SEQ ID NO: 161548 - RNA, 19 nt, Artificial Sequence
  Description of Artificial Sequence: Synthetic oligonucleotide
agaccagccuggccaacuu

SEQ ID NO: 161549 - RNA, 19 nt, Artificial Sequence
  Description of Artificial Sequence: Synthetic oligonucleotide
uagugaaaccccaucucua

SEQ ID NO: 161550 - RNA, 19 nt, Artificial Sequence
  Description of Artificial Sequence: Synthetic oligonucleotide
acuaaaaaugcaaaaauua

SEQ ID NO: 161551 - RNA, 19 nt, Artificial Sequence
  Description of Artificial Sequence: Synthetic oligonucleotide
auccaggcaugguggcaca

SEQ ID NO: 161552 - RNA, 19 nt, Artificial Sequence
  Description of Artificial Sequence: Synthetic oligonucleotide
acgccuguaaucccagcuc

SEQ ID NO: 161553 - RNA, 19 nt, Artificial Sequence
  Description of Artificial Sequence: Synthetic oligonucleotide
ccacaggaggcugaggcag

SEQ ID NO: 161554 - RNA, 19 nt, Artificial Sequence
  Description of Artificial Sequence: Synthetic oligonucleotide
gaaucccuugaagcuggga

SEQ ID NO: 161555 - RNA, 19 nt, Artificial Sequence
  Description of Artificial Sequence: Synthetic oligonucleotide
aggcggagguugcagugag

SEQ ID NO: 161556 - RNA, 19 nt, Artificial Sequence
  Description of Artificial Sequence: Synthetic oligonucleotide
gccgagauugcgccauugc

SEQ ID NO: 161557 - RNA, 19 nt, Artificial Sequence
  Description of Artificial Sequence: Synthetic oligonucleotide
cacuccagccugggcaaca

SEQ ID NO: 161558 - RNA, 19 nt, Artificial Sequence
  Description of Artificial Sequence: Synthetic oligonucleotide
agagaaaacaaaaaggaaa

SEQ ID NO: 161559 - RNA, 19 nt, Artificial Sequence
  Description of Artificial Sequence: Synthetic oligonucleotide
aacaaaugaugaaggucug

SEQ ID NO: 161560 - RNA, 19 nt, Artificial Sequence
  Description of Artificial Sequence: Synthetic oligonucleotide
gcagaaacugaaacccaga

SEQ ID NO: 161561 - RNA, 19 nt, Artificial Sequence
  Description of Artificial Sequence: Synthetic oligonucleotide
acaugugucugcccccucu

SEQ ID NO: 161562 - RNA, 19 nt, Artificial Sequence
  Description of Artificial Sequence: Synthetic oligonucleotide
uaugugggcaugguuuugc

SEQ ID NO: 161563 - RNA, 19 nt, Artificial Sequence
  Description of Artificial Sequence: Synthetic oligonucleotide
ccagugcuucuaagugcag

SEQ ID NO: 161564 - RNA, 19 nt, Artificial Sequence
  Description of Artificial Sequence: Synthetic oligonucleotide
ggagaacaugucaccugag

SEQ ID NO: 161565 - RNA, 19 nt, Artificial Sequence
  Description of Artificial Sequence: Synthetic oligonucleotide
ggcuaguuuugcauucagg

SEQ ID NO: 161566 - RNA, 19 nt, Artificial Sequence
  Description of Artificial Sequence: Synthetic oligonucleotide
gucccuggcuucguuucuu

SEQ ID NO: 161567 - RNA, 19 nt, Artificial Sequence
  Description of Artificial Sequence: Synthetic oligonucleotide
uguugguaugccuccccag

SEQ ID NO: 161568 - RNA, 19 nt, Artificial Sequence
  Description of Artificial Sequence: Synthetic oligonucleotide
gaucguccuuccuguaucc

SEQ ID NO: 161569 - RNA, 19 nt, Artificial Sequence
  Description of Artificial Sequence: Synthetic oligonucleotide
caugugaccagacuguauu

SEQ ID NO: 161570 - RNA, 19 nt, Artificial Sequence
  Description of Artificial Sequence: Synthetic oligonucleotide
uuguugggacugucgcaga

SEQ ID NO: 161571 - RNA, 19 nt, Artificial Sequence
  Description of Artificial Sequence: Synthetic oligonucleotide
aucuuggcuucuuacaguu

SEQ ID NO: 161572 - RNA, 19 nt, Artificial Sequence
  Description of Artificial Sequence: Synthetic oligonucleotide
ucuuccuguccaaacucca

SEQ ID NO: 161573 - RNA, 19 nt, Artificial Sequence
  Description of Artificial Sequence: Synthetic oligonucleotide
auccugucccucaggaacg

SEQ ID NO: 161574 - RNA, 19 nt, Artificial Sequence
  Description of Artificial Sequence: Synthetic oligonucleotide
ggggggaaaauucuccgaa

SEQ ID NO: 161575 - RNA, 19 nt, Artificial Sequence
  Description of Artificial Sequence: Synthetic oligonucleotide
auguuuuugguuuuuuggc

SEQ ID NO: 161576 - RNA, 19 nt, Artificial Sequence
  Description of Artificial Sequence: Synthetic oligonucleotide
cugcuuggaauuuacuucu

SEQ ID NO: 161577 - RNA, 19 nt, Artificial Sequence
  Description of Artificial Sequence: Synthetic oligonucleotide
ugccaccugcuggucauca

SEQ ID NO: 161578 - RNA, 19 nt, Artificial Sequence
  Description of Artificial Sequence: Synthetic oligonucleotide
acuguccucacuaagugga

SEQ ID NO: 161579 - RNA, 19 nt, Artificial Sequence
  Description of Artificial Sequence: Synthetic oligonucleotide
auucuggcucccccguacc

SEQ ID NO: 161580 - RNA, 19 nt, Artificial Sequence
  Description of Artificial Sequence: Synthetic oligonucleotide
cucauggcucaaacuacca

SEQ ID NO: 161581 - RNA, 19 nt, Artificial Sequence
  Description of Artificial Sequence: Synthetic oligonucleotide
acuccucagucgcuauauu

SEQ ID NO: 161582 - RNA, 19 nt, Artificial Sequence
  Description of Artificial Sequence: Synthetic oligonucleotide
uaaagcuuauauuuugcug

SEQ ID NO: 161583 - RNA, 19 nt, Artificial Sequence
  Description of Artificial Sequence: Synthetic oligonucleotide
ggauuacugcuaaauacaa

SEQ ID NO: 161584 - RNA, 19 nt, Artificial Sequence
  Description of Artificial Sequence: Synthetic oligonucleotide
aaagaaaguucaauauguu

SEQ ID NO: 161585 - RNA, 19 nt, Artificial Sequence
  Description of Artificial Sequence: Synthetic oligonucleotide
uuucauuucuguagggaaa

SEQ ID NO: 161586 - RNA, 19 nt, Artificial Sequence
  Description of Artificial Sequence: Synthetic oligonucleotide
aaugggauugcugcuuuaa

SEQ ID NO: 161587 - RNA, 19 nt, Artificial Sequence
  Description of Artificial Sequence: Synthetic oligonucleotide
aauuucugagcuagggauu

SEQ ID NO: 161588 - RNA, 19 nt, Artificial Sequence
  Description of Artificial Sequence: Synthetic oligonucleotide
uuuuuggcagcugcagugu

SEQ ID NO: 161589 - RNA, 19 nt, Artificial Sequence
  Description of Artificial Sequence: Synthetic oligonucleotide
uuggcgacuauuguaaaau

SEQ ID NO: 161590 - RNA, 19 nt, Artificial Sequence
  Description of Artificial Sequence: Synthetic oligonucleotide
uucucuuuguuucucucug

SEQ ID NO: 161591 - RNA, 19 nt, Artificial Sequence
  Description of Artificial Sequence: Synthetic oligonucleotide
guaaauagcaccugcuaac

SEQ ID NO: 161592 - RNA, 19 nt, Artificial Sequence
  Description of Artificial Sequence: Synthetic oligonucleotide
cauuacaauuuguauuuau

SEQ ID NO: 161593 - RNA, 19 nt, Artificial Sequence
  Description of Artificial Sequence: Synthetic oligonucleotide
uguuuaaagaaggcaucau

SEQ ID NO: 161594 - RNA, 19 nt, Artificial Sequence
  Description of Artificial Sequence: Synthetic oligonucleotide
uuuggugaacagaacuagg

SEQ ID NO: 161595 - RNA, 19 nt, Artificial Sequence
  Description of Artificial Sequence: Synthetic oligonucleotide
gaaaugaauuuuuagcucu

SEQ ID NO: 161596 - RNA, 19 nt, Artificial Sequence
  Description of Artificial Sequence: Synthetic oligonucleotide
uuaaaagcauuugcuuuga

SEQ ID NO: 161597 - RNA, 19 nt, Artificial Sequence
  Description of Artificial Sequence: Synthetic oligonucleotide
agaccgcacaggagugucu

SEQ ID NO: 161598 - RNA, 19 nt, Artificial Sequence
  Description of Artificial Sequence: Synthetic oligonucleotide
uuuccuuguaaaacaguga

SEQ ID NO: 161599 - RNA, 19 nt, Artificial Sequence
  Description of Artificial Sequence: Synthetic oligonucleotide
augauaauuucugccuugg

SEQ ID NO: 161600 - RNA, 19 nt, Artificial Sequence
  Description of Artificial Sequence: Synthetic oligonucleotide
gcccuaccuugaagcaaug

SEQ ID NO: 161601 - RNA, 19 nt, Artificial Sequence
  Description of Artificial Sequence: Synthetic oligonucleotide
guugugugaagggaugaag

SEQ ID NO: 161602 - RNA, 19 nt, Artificial Sequence
  Description of Artificial Sequence: Synthetic oligonucleotide
gaaucuaaaagucuucaua

SEQ ID NO: 161603 - RNA, 19 nt, Artificial Sequence
  Description of Artificial Sequence: Synthetic oligonucleotide
aaguccuugggagaggugc

SEQ ID NO: 161604 - RNA, 19 nt, Artificial Sequence
  Description of Artificial Sequence: Synthetic oligonucleotide
cuagaaaaauauaaggcac

SEQ ID NO: 161605 - RNA, 19 nt, Artificial Sequence
  Description of Artificial Sequence: Synthetic oligonucleotide
cuaucauaauuacagugau

SEQ ID NO: 161606 - RNA, 19 nt, Artificial Sequence
  Description of Artificial Sequence: Synthetic oligonucleotide
uguccuugcuguuacuacu

SEQ ID NO: 161607 - RNA, 19 nt, Artificial Sequence
  Description of Artificial Sequence: Synthetic oligonucleotide
ucaaaucacccacaaauuu

SEQ ID NO: 161608 - RNA, 19 nt, Artificial Sequence
  Description of Artificial Sequence: Synthetic oligonucleotide
uccccaaagacugcgcuag

SEQ ID NO: 161609 - RNA, 19 nt, Artificial Sequence
  Description of Artificial Sequence: Synthetic oligonucleotide
gcugucaaauaaaagacag

SEQ ID NO: 161610 - RNA, 19 nt, Artificial Sequence
  Description of Artificial Sequence: Synthetic oligonucleotide
gugaaauugaccugaaaaa

SEQ ID NO: 161611 - RNA, 19 nt, Artificial Sequence
  Description of Artificial Sequence: Synthetic oligonucleotide
gaggaacuuuucaagcagc

SEQ ID NO: 161612 - RNA, 19 nt, Artificial Sequence
  Description of Artificial Sequence: Synthetic oligonucleotide
cguaugcccguagcuccau

SEQ ID NO: 161613 - RNA, 19 nt, Artificial Sequence
  Description of Artificial Sequence: Synthetic oligonucleotide
uauuggacauccccagaaa

SEQ ID NO: 161614 - RNA, 19 nt, Artificial Sequence
  Description of Artificial Sequence: Synthetic oligonucleotide
aagauggaaaagaaauugc

SEQ ID NO: 161615 - RNA, 19 nt, Artificial Sequence
  Description of Artificial Sequence: Synthetic oligonucleotide
caugcagugccggcugcca

SEQ ID NO: 161616 - RNA, 19 nt, Artificial Sequence
  Description of Artificial Sequence: Synthetic oligonucleotide
aagacagugaaguucaaau

SEQ ID NO: 161617 - RNA, 19 nt, Artificial Sequence
  Description of Artificial Sequence: Synthetic oligonucleotide
ugcccuuccagugggaccc

SEQ ID NO: 161618 - RNA, 19 nt, Artificial Sequence
  Description of Artificial Sequence: Synthetic oligonucleotide
ccaaaccccacacugcgcu

SEQ ID NO: 161619 - RNA, 19 nt, Artificial Sequence
  Description of Artificial Sequence: Synthetic oligonucleotide
ugguugaaaaauggcaaag

SEQ ID NO: 161620 - RNA, 19 nt, Artificial Sequence
  Description of Artificial Sequence: Synthetic oligonucleotide
gaauucaaaccugaccaca

SEQ ID NO: 161621 - RNA, 19 nt, Artificial Sequence
  Description of Artificial Sequence: Synthetic oligonucleotide
agaauuggaggcuacaagg

SEQ ID NO: 161622 - RNA, 19 nt, Artificial Sequence
  Description of Artificial Sequence: Synthetic oligonucleotide
guccguuaugccaccugga

SEQ ID NO: 161623 - RNA, 19 nt, Artificial Sequence
  Description of Artificial Sequence: Synthetic oligonucleotide
agcaucauaauggacucug

SEQ ID NO: 161624 - RNA, 19 nt, Artificial Sequence
  Description of Artificial Sequence: Synthetic oligonucleotide
guggugcccucugacaagg

SEQ ID NO: 161625 - RNA, 19 nt, Artificial Sequence
  Description of Artificial Sequence: Synthetic oligonucleotide
ggcaacuacaccugcauug

SEQ ID NO: 161626 - RNA, 19 nt, Artificial Sequence
  Description of Artificial Sequence: Synthetic oligonucleotide
guggagaaugaguacggca

SEQ ID NO: 161627 - RNA, 19 nt, Artificial Sequence
  Description of Artificial Sequence: Synthetic oligonucleotide
agcaucaaccacacauacc

SEQ ID NO: 161628 - RNA, 19 nt, Artificial Sequence
  Description of Artificial Sequence: Synthetic oligonucleotide
cagcuggaugucguggagc

SEQ ID NO: 161629 - RNA, 19 nt, Artificial Sequence
  Description of Artificial Sequence: Synthetic oligonucleotide
cgguccccucaccggccca

SEQ ID NO: 161630 - RNA, 19 nt, Artificial Sequence
  Description of Artificial Sequence: Synthetic oligonucleotide
auccugcaagcaggguugc

SEQ ID NO: 161631 - RNA, 19 nt, Artificial Sequence
  Description of Artificial Sequence: Synthetic oligonucleotide
cccgccaacaaaacagugg

SEQ ID NO: 161632 - RNA, 19 nt, Artificial Sequence
  Description of Artificial Sequence: Synthetic oligonucleotide
gcccuggguagcaacgugg

SEQ ID NO: 161633 - RNA, 19 nt, Artificial Sequence
  Description of Artificial Sequence: Synthetic oligonucleotide
gaguucauguguaaggugu

SEQ ID NO: 161634 - RNA, 19 nt, Artificial Sequence
  Description of Artificial Sequence: Synthetic oligonucleotide
uacagugacccgcagccgc

SEQ ID NO: 161635 - RNA, 19 nt, Artificial Sequence
  Description of Artificial Sequence: Synthetic oligonucleotide
cacauccaguggcuaaagc

SEQ ID NO: 161636 - RNA, 19 nt, Artificial Sequence
  Description of Artificial Sequence: Synthetic oligonucleotide
cacaucgaggugaauggga

SEQ ID NO: 161637 - RNA, 19 nt, Artificial Sequence
  Description of Artificial Sequence: Synthetic oligonucleotide
agcaagauuggcccagaca

SEQ ID NO: 161638 - RNA, 19 nt, Artificial Sequence
  Description of Artificial Sequence: Synthetic oligonucleotide
aaccugccuuauguccaga

SEQ ID NO: 161639 - RNA, 19 nt, Artificial Sequence
  Description of Artificial Sequence: Synthetic oligonucleotide
aucuugaagacugcuggag

SEQ ID NO: 161640 - RNA, 19 nt, Artificial Sequence
  Description of Artificial Sequence: Synthetic oligonucleotide
guuaauaccaccgacaaag

SEQ ID NO: 161641 - RNA, 19 nt, Artificial Sequence
  Description of Artificial Sequence: Synthetic oligonucleotide
gagauggaggugcuucacu

SEQ ID NO: 161642 - RNA, 19 nt, Artificial Sequence
  Description of Artificial Sequence: Synthetic oligonucleotide
uuaagaaaugucuccuuug

SEQ ID NO: 161643 - RNA, 19 nt, Artificial Sequence
  Description of Artificial Sequence: Synthetic oligonucleotide
gaggacgcaggggaguaua

SEQ ID NO: 161644 - RNA, 19 nt, Artificial Sequence
  Description of Artificial Sequence: Synthetic oligonucleotide
acgugcuuggcggguaacu

SEQ ID NO: 161645 - RNA, 19 nt, Artificial Sequence
  Description of Artificial Sequence: Synthetic oligonucleotide
ucuaucggacucucccauc

SEQ ID NO: 161646 - RNA, 19 nt, Artificial Sequence
  Description of Artificial Sequence: Synthetic oligonucleotide
cacucugcaugguugaccg

SEQ ID NO: 161647 - RNA, 19 nt, Artificial Sequence
  Description of Artificial Sequence: Synthetic oligonucleotide
guucuggaagcccuggaag

SEQ ID NO: 161648 - RNA, 19 nt, Artificial Sequence
  Description of Artificial Sequence: Synthetic oligonucleotide
gagaggccggcagugauga

SEQ ID NO: 161649 - RNA, 19 nt, Artificial Sequence
  Description of Artificial Sequence: Synthetic oligonucleotide
accucgccccuguaccugg

SEQ ID NO: 161650 - RNA, 19 nt, Artificial Sequence
  Description of Artificial Sequence: Synthetic oligonucleotide
gagaucaucaucuauugca

SEQ ID NO: 161651 - RNA, 19 nt, Artificial Sequence
  Description of Artificial Sequence: Synthetic oligonucleotide
acaggggccuuccucaucu

SEQ ID NO: 161652 - RNA, 19 nt, Artificial Sequence
  Description of Artificial Sequence: Synthetic oligonucleotide
uccugcaugguggggucgg

SEQ ID NO: 161653 - RNA, 19 nt, Artificial Sequence
  Description of Artificial Sequence: Synthetic oligonucleotide
gucaucgucuacaagauga

SEQ ID NO: 161654 - RNA, 19 nt, Artificial Sequence
  Description of Artificial Sequence: Synthetic oligonucleotide
aagagugguaccaagaaga

SEQ ID NO: 161655 - RNA, 19 nt, Artificial Sequence
  Description of Artificial Sequence: Synthetic oligonucleotide
agugacuuccacagccaga

SEQ ID NO: 161656 - RNA, 19 nt, Artificial Sequence
  Description of Artificial Sequence: Synthetic oligonucleotide
auggcugugcacaagcugg

SEQ ID NO: 161657 - RNA, 19 nt, Artificial Sequence
  Description of Artificial Sequence: Synthetic oligonucleotide
gccaagagcaucccucugc

SEQ ID NO: 161658 - RNA, 19 nt, Artificial Sequence
  Description of Artificial Sequence: Synthetic oligonucleotide
cgcagacagguaacagugu

SEQ ID NO: 161659 - RNA, 19 nt, Artificial Sequence
  Description of Artificial Sequence: Synthetic oligonucleotide
ucugcugacuccagugcau

SEQ ID NO: 161660 - RNA, 19 nt, Artificial Sequence
  Description of Artificial Sequence: Synthetic oligonucleotide
uccaugaacucugggguuc

SEQ ID NO: 161661 - RNA, 19 nt, Artificial Sequence
  Description of Artificial Sequence: Synthetic oligonucleotide
cuucugguucggccaucac

SEQ ID NO: 161662 - RNA, 19 nt, Artificial Sequence
  Description of Artificial Sequence: Synthetic oligonucleotide
cggcucuccuccaguggga

SEQ ID NO: 161663 - RNA, 19 nt, Artificial Sequence
  Description of Artificial Sequence: Synthetic oligonucleotide
acucccaugcuagcagggg

SEQ ID NO: 161664 - RNA, 19 nt, Artificial Sequence
  Description of Artificial Sequence: Synthetic oligonucleotide
gucucugaguaugagcuuc

SEQ ID NO: 161665 - RNA, 19 nt, Artificial Sequence
  Description of Artificial Sequence: Synthetic oligonucleotide
cccgaagacccucgcuggg

SEQ ID NO: 161666 - RNA, 19 nt, Artificial Sequence
  Description of Artificial Sequence: Synthetic oligonucleotide
gagcugccucgggacagac

SEQ ID NO: 161667 - RNA, 19 nt, Artificial Sequence
  Description of Artificial Sequence: Synthetic oligonucleotide
cuggucuuaggcaaacccc

SEQ ID NO: 161668 - RNA, 19 nt, Artificial Sequence
  Description of Artificial Sequence: Synthetic oligonucleotide
cugggagagggcugcuuug

SEQ ID NO: 161669 - RNA, 19 nt, Artificial Sequence
  Description of Artificial Sequence: Synthetic oligonucleotide
gggcaggugguguuggcag

SEQ ID NO: 161670 - RNA, 19 nt, Artificial Sequence
  Description of Artificial Sequence: Synthetic oligonucleotide
gaggcuaucgggcuggaca

SEQ ID NO: 161671 - RNA, 19 nt, Artificial Sequence
  Description of Artificial Sequence: Synthetic oligonucleotide
aaggacaaacccaaccgug

SEQ ID NO: 161672 - RNA, 19 nt, Artificial Sequence
  Description of Artificial Sequence: Synthetic oligonucleotide
gugaccaaaguggcuguga

SEQ ID NO: 161673 - RNA, 19 nt, Artificial Sequence
  Description of Artificial Sequence: Synthetic oligonucleotide
aagauguugaagucggacg

SEQ ID NO: 161674 - RNA, 19 nt, Artificial Sequence
  Description of Artificial Sequence: Synthetic oligonucleotide
gcaacagagaaagacuugu

SEQ ID NO: 161675 - RNA, 19 nt, Artificial Sequence
  Description of Artificial Sequence: Synthetic oligonucleotide
ucagaccugaucucagaaa

SEQ ID NO: 161676 - RNA, 19 nt, Artificial Sequence
  Description of Artificial Sequence: Synthetic oligonucleotide
auggagaugaugaagauga

SEQ ID NO: 161677 - RNA, 19 nt, Artificial Sequence
  Description of Artificial Sequence: Synthetic oligonucleotide
aucgggaagcauaagaaua

SEQ ID NO: 161678 - RNA, 19 nt, Artificial Sequence
  Description of Artificial Sequence: Synthetic oligonucleotide
aucaucaaccugcuggggg

SEQ ID NO: 161679 - RNA, 19 nt, Artificial Sequence
  Description of Artificial Sequence: Synthetic oligonucleotide
gccugcacgcaggaugguc

SEQ ID NO: 161680 - RNA, 19 nt, Artificial Sequence
  Description of Artificial Sequence: Synthetic oligonucleotide
cccuuguaugucaucgugg

SEQ ID NO: 161681 - RNA, 19 nt, Artificial Sequence
  Description of Artificial Sequence: Synthetic oligonucleotide
gaguaugccuccaagggca

SEQ ID NO: 161682 - RNA, 19 nt, Artificial Sequence
  Description of Artificial Sequence: Synthetic oligonucleotide
aaccugcgggaguaccugc

SEQ ID NO: 161683 - RNA, 19 nt, Artificial Sequence
  Description of Artificial Sequence: Synthetic oligonucleotide
caggcccggaggcccccag

SEQ ID NO: 161684 - RNA, 19 nt, Artificial Sequence
  Description of Artificial Sequence: Synthetic oligonucleotide
gggcuggaauacugcuaca

SEQ ID NO: 161685 - RNA, 19 nt, Artificial Sequence
  Description of Artificial Sequence: Synthetic oligonucleotide
aaccccagccacaacccag

SEQ ID NO: 161686 - RNA, 19 nt, Artificial Sequence
  Description of Artificial Sequence: Synthetic oligonucleotide
gaggagcagcucuccucca

SEQ ID NO: 161687 - RNA, 19 nt, Artificial Sequence
  Description of Artificial Sequence: Synthetic oligonucleotide
aaggaccugguguccugcg

SEQ ID NO: 161688 - RNA, 19 nt, Artificial Sequence
  Description of Artificial Sequence: Synthetic oligonucleotide
gccuaccagguggcccgag

SEQ ID NO: 161689 - RNA, 19 nt, Artificial Sequence
  Description of Artificial Sequence: Synthetic oligonucleotide
ggcauggaguaucuggccu

SEQ ID NO: 161690 - RNA, 19 nt, Artificial Sequence
  Description of Artificial Sequence: Synthetic oligonucleotide
uccaagaagugcauacacc

SEQ ID NO: 161691 - RNA, 19 nt, Artificial Sequence
  Description of Artificial Sequence: Synthetic oligonucleotide
cgagaccuggcagccagga

SEQ ID NO: 161692 - RNA, 19 nt, Artificial Sequence
  Description of Artificial Sequence: Synthetic oligonucleotide
aauguccuggugacagagg

SEQ ID NO: 161693 - RNA, 19 nt, Artificial Sequence
  Description of Artificial Sequence: Synthetic oligonucleotide
gacaaugugaugaagauag

SEQ ID NO: 161694 - RNA, 19 nt, Artificial Sequence
  Description of Artificial Sequence: Synthetic oligonucleotide
gcagacuuuggccucgcac

SEQ ID NO: 161695 - RNA, 19 nt, Artificial Sequence
  Description of Artificial Sequence: Synthetic oligonucleotide
cgggacauucaccacaucg

SEQ ID NO: 161696 - RNA, 19 nt, Artificial Sequence
  Description of Artificial Sequence: Synthetic oligonucleotide
gacuacuauaaaaagacaa

SEQ ID NO: 161697 - RNA, 19 nt, Artificial Sequence
  Description of Artificial Sequence: Synthetic oligonucleotide
accaacggccgacugccug

SEQ ID NO: 161698 - RNA, 19 nt, Artificial Sequence
  Description of Artificial Sequence: Synthetic oligonucleotide
gugaaguggauggcacccg

SEQ ID NO: 161699 - RNA, 19 nt, Artificial Sequence
  Description of Artificial Sequence: Synthetic oligonucleotide
gaggcauuauuugaccgga

SEQ ID NO: 161700 - RNA, 19 nt, Artificial Sequence
  Description of Artificial Sequence: Synthetic oligonucleotide
aucuacacccaccagagug

SEQ ID NO: 161701 - RNA, 19 nt, Artificial Sequence
  Description of Artificial Sequence: Synthetic oligonucleotide
gauguguggucuuucgggg

SEQ ID NO: 161702 - RNA, 19 nt, Artificial Sequence
  Description of Artificial Sequence: Synthetic oligonucleotide
gugcuccugugggagaucu

SEQ ID NO: 161703 - RNA, 19 nt, Artificial Sequence
  Description of Artificial Sequence: Synthetic oligonucleotide
uucacucugggcggcuccc

SEQ ID NO: 161704 - RNA, 19 nt, Artificial Sequence
  Description of Artificial Sequence: Synthetic oligonucleotide
ccauaccccggugugccug

SEQ ID NO: 161705 - RNA, 19 nt, Artificial Sequence
  Description of Artificial Sequence: Synthetic oligonucleotide
guggaggaacuuuucaagc

SEQ ID NO: 161706 - RNA, 19 nt, Artificial Sequence
  Description of Artificial Sequence: Synthetic oligonucleotide
cugcugaaggagggucacc

SEQ ID NO: 161707 - RNA, 19 nt, Artificial Sequence
  Description of Artificial Sequence: Synthetic oligonucleotide
cgcauggacaagcccagua

SEQ ID NO: 161708 - RNA, 19 nt, Artificial Sequence
  Description of Artificial Sequence: Synthetic oligonucleotide
aacugcaccaacgagcugu

SEQ ID NO: 161709 - RNA, 19 nt, Artificial Sequence
  Description of Artificial Sequence: Synthetic oligonucleotide
uacaugaugaugcgggacu

SEQ ID NO: 161710 - RNA, 19 nt, Artificial Sequence
  Description of Artificial Sequence: Synthetic oligonucleotide
ugcuggcaugcagugcccu

SEQ ID NO: 161711 - RNA, 19 nt, Artificial Sequence
  Description of Artificial Sequence: Synthetic oligonucleotide
ucacagagacccaccuuca

SEQ ID NO: 161712 - RNA, 19 nt, Artificial Sequence
  Description of Artificial Sequence: Synthetic oligonucleotide
aagcagcugguggaagacc

SEQ ID NO: 161713 - RNA, 19 nt, Artificial Sequence
  Description of Artificial Sequence: Synthetic oligonucleotide
cuggaccgcaucguggccu

SEQ ID NO: 161714 - RNA, 19 nt, Artificial Sequence
  Description of Artificial Sequence: Synthetic oligonucleotide
uugaccuccaaccaggagu

SEQ ID NO: 161715 - RNA, 19 nt, Artificial Sequence
  Description of Artificial Sequence: Synthetic oligonucleotide
uaccuggaccuguccaugc

SEQ ID NO: 161716 - RNA, 19 nt, Artificial Sequence
  Description of Artificial Sequence: Synthetic oligonucleotide
ccccuggaccaguacuccc

SEQ ID NO: 161717 - RNA, 19 nt, Artificial Sequence
  Description of Artificial Sequence: Synthetic oligonucleotide
cccagcuuucccgacaccc

SEQ ID NO: 161718 - RNA, 19 nt, Artificial Sequence
  Description of Artificial Sequence: Synthetic oligonucleotide
cggagcucuacgugcuccu

SEQ ID NO: 161719 - RNA, 19 nt, Artificial Sequence
  Description of Artificial Sequence: Synthetic oligonucleotide
ucaggggaggauuccgucu

SEQ ID NO: 161720 - RNA, 19 nt, Artificial Sequence
  Description of Artificial Sequence: Synthetic oligonucleotide
uucucucaugagccgcugc

SEQ ID NO: 161721 - RNA, 19 nt, Artificial Sequence
  Description of Artificial Sequence: Synthetic oligonucleotide
cccgaggagcccugccugc

SEQ ID NO: 161722 - RNA, 19 nt, Artificial Sequence
  Description of Artificial Sequence: Synthetic oligonucleotide
ccccgacacccagcccagc

SEQ ID NO: 161723 - RNA, 19 nt, Artificial Sequence
  Description of Artificial Sequence: Synthetic oligonucleotide
cuugccaauggcggacuca

SEQ ID NO: 161724 - RNA, 19 nt, Artificial Sequence
  Description of Artificial Sequence: Synthetic oligonucleotide
aaacgccgcugacugccac

SEQ ID NO: 161725 - RNA, 19 nt, Artificial Sequence
  Description of Artificial Sequence: Synthetic oligonucleotide
cccacacgcccuccccaga

SEQ ID NO: 161726 - RNA, 19 nt, Artificial Sequence
  Description of Artificial Sequence: Synthetic oligonucleotide
acuccaccgucagcuguaa

SEQ ID NO: 161727 - RNA, 19 nt, Artificial Sequence
  Description of Artificial Sequence: Synthetic oligonucleotide
acccucacccacagccccu

SEQ ID NO: 161728 - RNA, 19 nt, Artificial Sequence
  Description of Artificial Sequence: Synthetic oligonucleotide
ugcugggcccaccaccugu

SEQ ID NO: 161729 - RNA, 19 nt, Artificial Sequence
  Description of Artificial Sequence: Synthetic oligonucleotide
uccgucccuguccccuuuc

SEQ ID NO: 161730 - RNA, 19 nt, Artificial Sequence
  Description of Artificial Sequence: Synthetic oligonucleotide
ccugcuggcaggagccggc

SEQ ID NO: 161731 - RNA, 19 nt, Artificial Sequence
  Description of Artificial Sequence: Synthetic oligonucleotide
cugccuaccaggggccuuc

SEQ ID NO: 161732 - RNA, 19 nt, Artificial Sequence
  Description of Artificial Sequence: Synthetic oligonucleotide
ccuguguggccugccuuca

SEQ ID NO: 161733 - RNA, 19 nt, Artificial Sequence
  Description of Artificial Sequence: Synthetic oligonucleotide
accccacucagcucaccuc

SEQ ID NO: 161734 - RNA, 19 nt, Artificial Sequence
  Description of Artificial Sequence: Synthetic oligonucleotide
cucccuccaccuccucucc

SEQ ID NO: 161735 - RNA, 19 nt, Artificial Sequence
  Description of Artificial Sequence: Synthetic oligonucleotide
caccugcuggugagaggug

SEQ ID NO: 161736 - RNA, 19 nt, Artificial Sequence
  Description of Artificial Sequence: Synthetic oligonucleotide
gcaaagaggcagaucuuug

SEQ ID NO: 161737 - RNA, 19 nt, Artificial Sequence
  Description of Artificial Sequence: Synthetic oligonucleotide
gcugccagccacuucaucc

SEQ ID NO: 161738 - RNA, 19 nt, Artificial Sequence
  Description of Artificial Sequence: Synthetic oligonucleotide
cccucccagauguuggacc

SEQ ID NO: 161739 - RNA, 19 nt, Artificial Sequence
  Description of Artificial Sequence: Synthetic oligonucleotide
caacaccccucccugccac

SEQ ID NO: 161740 - RNA, 19 nt, Artificial Sequence
  Description of Artificial Sequence: Synthetic oligonucleotide
ccaggcacugccuggaggg

SEQ ID NO: 161741 - RNA, 19 nt, Artificial Sequence
  Description of Artificial Sequence: Synthetic oligonucleotide
gcagggagugggagccaau

SEQ ID NO: 161742 - RNA, 19 nt, Artificial Sequence
  Description of Artificial Sequence: Synthetic oligonucleotide
ugaacaggcaugcaaguga

SEQ ID NO: 161743 - RNA, 19 nt, Artificial Sequence
  Description of Artificial Sequence: Synthetic oligonucleotide
agagcuuccugagcuuucu

SEQ ID NO: 161744 - RNA, 19 nt, Artificial Sequence
  Description of Artificial Sequence: Synthetic oligonucleotide
uccugucgguuuggucugu

SEQ ID NO: 161745 - RNA, 19 nt, Artificial Sequence
  Description of Artificial Sequence: Synthetic oligonucleotide
uuuugccuucacccauaag

SEQ ID NO: 161746 - RNA, 19 nt, Artificial Sequence
  Description of Artificial Sequence: Synthetic oligonucleotide
gccccucgcacucuggugg

SEQ ID NO: 161747 - RNA, 19 nt, Artificial Sequence
  Description of Artificial Sequence: Synthetic oligonucleotide
gcaggugccuuguccucag

SEQ ID NO: 161748 - RNA, 19 nt, Artificial Sequence
  Description of Artificial Sequence: Synthetic oligonucleotide
gggcuacagcaguagggag

SEQ ID NO: 161749 - RNA, 19 nt, Artificial Sequence
  Description of Artificial Sequence: Synthetic oligonucleotide
ggucagugcuucgugccuc

SEQ ID NO: 161750 - RNA, 19 nt, Artificial Sequence
  Description of Artificial Sequence: Synthetic oligonucleotide
cgauugaaggugaccucug

SEQ ID NO: 161751 - RNA, 19 nt, Artificial Sequence
  Description of Artificial Sequence: Synthetic oligonucleotide
gccccagauagguggugcc

SEQ ID NO: 161752 - RNA, 19 nt, Artificial Sequence
  Description of Artificial Sequence: Synthetic oligonucleotide
caguggcuuauuaauuccg

SEQ ID NO: 161753 - RNA, 19 nt, Artificial Sequence
  Description of Artificial Sequence: Synthetic oligonucleotide
gauacuaguuugcuuugcu

SEQ ID NO: 161754 - RNA, 19 nt, Artificial Sequence
  Description of Artificial Sequence: Synthetic oligonucleotide
ugaccaaaugccugguacc

SEQ ID NO: 161755 - RNA, 19 nt, Artificial Sequence
  Description of Artificial Sequence: Synthetic oligonucleotide
cagaggauggugaggcgaa

SEQ ID NO: 161756 - RNA, 19 nt, Artificial Sequence
  Description of Artificial Sequence: Synthetic oligonucleotide
aggccagguugggggcagu

SEQ ID NO: 161757 - RNA, 19 nt, Artificial Sequence
  Description of Artificial Sequence: Synthetic oligonucleotide
uguuguggcccuggggccc

SEQ ID NO: 161758 - RNA, 19 nt, Artificial Sequence
  Description of Artificial Sequence: Synthetic oligonucleotide
cagccccaaacugggggcu

SEQ ID NO: 161759 - RNA, 19 nt, Artificial Sequence
  Description of Artificial Sequence: Synthetic oligonucleotide
ucuguauauagcuaugaag

SEQ ID NO: 161760 - RNA, 19 nt, Artificial Sequence
  Description of Artificial Sequence: Synthetic oligonucleotide
gaaaacacaaaguguauaa

SEQ ID NO: 161761 - RNA, 19 nt, Artificial Sequence
  Description of Artificial Sequence: Synthetic oligonucleotide
aaucugaguauauauuuac

SEQ ID NO: 161762 - RNA, 19 nt, Artificial Sequence
  Description of Artificial Sequence: Synthetic oligonucleotide
caugucuuuuuaaaagggu

SEQ ID NO: 161763 - RNA, 19 nt, Artificial Sequence
  Description of Artificial Sequence: Synthetic oligonucleotide
ucguuaccagagauuuacc

SEQ ID NO: 161764 - RNA, 19 nt, Artificial Sequence
  Description of Artificial Sequence: Synthetic oligonucleotide
ccaucggguaagaugcucc

SEQ ID NO: 161765 - RNA, 19 nt, Artificial Sequence
  Description of Artificial Sequence: Synthetic oligonucleotide
cugguggcugggaggcauc

SEQ ID NO: 161766 - RNA, 19 nt, Artificial Sequence
  Description of Artificial Sequence: Synthetic oligonucleotide
caguugcuauauauuaaaa

SEQ ID NO: 161767 - RNA, 19 nt, Artificial Sequence
  Description of Artificial Sequence: Synthetic oligonucleotide
aacaaaaaagaaaaaaaag

SEQ ID NO: 161768 - RNA, 19 nt, Artificial Sequence
  Description of Artificial Sequence: Synthetic oligonucleotide
ggaaaauguuuuuaaaaag

SEQ ID NO: 161769 - RNA, 19 nt, Artificial Sequence
  Description of Artificial Sequence: Synthetic oligonucleotide
ggucauauauuuuuugcua

SEQ ID NO: 161770 - RNA, 19 nt, Artificial Sequence
  Description of Artificial Sequence: Synthetic oligonucleotide
acuuuugcuguuuuauuuu

SEQ ID NO: 161771 - RNA, 19 nt, Artificial Sequence
  Description of Artificial Sequence: Synthetic oligonucleotide
uuuuaaauuauguucuaaa

SEQ ID NO: 161772 - RNA, 19 nt, Artificial Sequence
  Description of Artificial Sequence: Synthetic oligonucleotide
accuauuuucaguuuaggu

SEQ ID NO: 161773 - RNA, 19 nt, Artificial Sequence
  Description of Artificial Sequence: Synthetic oligonucleotide
ucccucaauaaaaauugcu

SEQ ID NO: 161774 - RNA, 19 nt, Artificial Sequence
  Description of Artificial Sequence: Synthetic oligonucleotide
ugcugcuucauuuaucuau

SEQ ID NO: 161775 - RNA, 19 nt, Artificial Sequence
  Description of Artificial Sequence: Synthetic oligonucleotide
ugggcuguaugaaaagggu

SEQ ID NO: 161776 - RNA, 19 nt, Artificial Sequence
  Description of Artificial Sequence: Synthetic oligonucleotide
ugggaauguccacuggaaa

SEQ ID NO: 161777 - RNA, 19 nt, Artificial Sequence
  Description of Artificial Sequence: Synthetic oligonucleotide
agaagggacacccacgggc

SEQ ID NO: 161778 - RNA, 19 nt, Artificial Sequence
  Description of Artificial Sequence: Synthetic oligonucleotide
cccuggggcuaggucuguc

SEQ ID NO: 161779 - RNA, 19 nt, Artificial Sequence
  Description of Artificial Sequence: Synthetic oligonucleotide
cccgagggcaccgcaugcu

SEQ ID NO: 161780 - RNA, 19 nt, Artificial Sequence
  Description of Artificial Sequence: Synthetic oligonucleotide
ucccggcgcagguuccuug

SEQ ID NO: 161781 - RNA, 19 nt, Artificial Sequence
  Description of Artificial Sequence: Synthetic oligonucleotide
guaaccucuucuuccuagg

SEQ ID NO: 161782 - RNA, 19 nt, Artificial Sequence
  Description of Artificial Sequence: Synthetic oligonucleotide
guccugcacccagaccuca

SEQ ID NO: 161783 - RNA, 19 nt, Artificial Sequence
  Description of Artificial Sequence: Synthetic oligonucleotide
acgacgcaccuccugccuc

SEQ ID NO: 161784 - RNA, 19 nt, Artificial Sequence
  Description of Artificial Sequence: Synthetic oligonucleotide
cuccgcugcuuuuggaaag

SEQ ID NO: 161785 - RNA, 19 nt, Artificial Sequence
  Description of Artificial Sequence: Synthetic oligonucleotide
gucagaaaaagaagauguc

SEQ ID NO: 161786 - RNA, 19 nt, Artificial Sequence
  Description of Artificial Sequence: Synthetic oligonucleotide
cugcuucgagggcaggaac

SEQ ID NO: 161787 - RNA, 19 nt, Artificial Sequence
  Description of Artificial Sequence: Synthetic oligonucleotide
ccccauccaugcaguagag

SEQ ID NO: 161788 - RNA, 19 nt, Artificial Sequence
  Description of Artificial Sequence: Synthetic oligonucleotide
ggcgcugggcagagaguca

SEQ ID NO: 161789 - RNA, 19 nt, Artificial Sequence
  Description of Artificial Sequence: Synthetic oligonucleotide
aaggcccagcagccaucga

SEQ ID NO: 161790 - RNA, 19 nt, Artificial Sequence
  Description of Artificial Sequence: Synthetic oligonucleotide
accauggaugguuuccucc

SEQ ID NO: 161791 - RNA, 19 nt, Artificial Sequence
  Description of Artificial Sequence: Synthetic oligonucleotide
caaggaaaccggugggguu

SEQ ID NO: 161792 - RNA, 19 nt, Artificial Sequence
  Description of Artificial Sequence: Synthetic oligonucleotide
ugggcuggggagggggcac

SEQ ID NO: 161793 - RNA, 19 nt, Artificial Sequence
  Description of Artificial Sequence: Synthetic oligonucleotide
ccuaccuaggaauagccac

SEQ ID NO: 161794 - RNA, 19 nt, Artificial Sequence
  Description of Artificial Sequence: Synthetic oligonucleotide
cgggguagagcuacaguga

SEQ ID NO: 161795 - RNA, 19 nt, Artificial Sequence
  Description of Artificial Sequence: Synthetic oligonucleotide
auuaagaggaaagcaaggg

SEQ ID NO: 161796 - RNA, 19 nt, Artificial Sequence
  Description of Artificial Sequence: Synthetic oligonucleotide
gcgcgguugcucacgccug

SEQ ID NO: 161797 - RNA, 19 nt, Artificial Sequence
  Description of Artificial Sequence: Synthetic oligonucleotide
guaaucccagcacuuuggg

SEQ ID NO: 161798 - RNA, 19 nt, Artificial Sequence
  Description of Artificial Sequence: Synthetic oligonucleotide
gacaccgaggugggcagau

SEQ ID NO: 161799 - RNA, 19 nt, Artificial Sequence
  Description of Artificial Sequence: Synthetic oligonucleotide
ucacuucaggucaggaguu

SEQ ID NO: 161800 - RNA, 19 nt, Artificial Sequence
  Description of Artificial Sequence: Synthetic oligonucleotide
uugagaccagccuggccaa

SEQ ID NO: 161801 - RNA, 19 nt, Artificial Sequence
  Description of Artificial Sequence: Synthetic oligonucleotide
acuuagugaaaccccaucu

SEQ ID NO: 161802 - RNA, 19 nt, Artificial Sequence
  Description of Artificial Sequence: Synthetic oligonucleotide
ucuacuaaaaaugcaaaaa

SEQ ID NO: 161803 - RNA, 19 nt, Artificial Sequence
  Description of Artificial Sequence: Synthetic oligonucleotide
auuauccaggcaugguggc

SEQ ID NO: 161804 - RNA, 19 nt, Artificial Sequence
  Description of Artificial Sequence: Synthetic oligonucleotide
cacacgccuguaaucccag

SEQ ID NO: 161805 - RNA, 19 nt, Artificial Sequence
  Description of Artificial Sequence: Synthetic oligonucleotide
gcuccacaggaggcugagg

SEQ ID NO: 161806 - RNA, 19 nt, Artificial Sequence
  Description of Artificial Sequence: Synthetic oligonucleotide
gcagaaucccuugaagcug

SEQ ID NO: 161807 - RNA, 19 nt, Artificial Sequence
  Description of Artificial Sequence: Synthetic oligonucleotide
gggaggcggagguugcagu

SEQ ID NO: 161808 - RNA, 19 nt, Artificial Sequence
  Description of Artificial Sequence: Synthetic oligonucleotide
ugagccgagauugcgccau

SEQ ID NO: 161809 - RNA, 19 nt, Artificial Sequence
  Description of Artificial Sequence: Synthetic oligonucleotide
uugcacuccagccugggca

SEQ ID NO: 161810 - RNA, 19 nt, Artificial Sequence
  Description of Artificial Sequence: Synthetic oligonucleotide
aacagagaaaacaaaaagg

SEQ ID NO: 161811 - RNA, 19 nt, Artificial Sequence
  Description of Artificial Sequence: Synthetic oligonucleotide
gaaaacaaaugaugaaggu

SEQ ID NO: 161812 - RNA, 19 nt, Artificial Sequence
  Description of Artificial Sequence: Synthetic oligonucleotide
ucugcagaaacugaaaccc

SEQ ID NO: 161813 - RNA, 19 nt, Artificial Sequence
  Description of Artificial Sequence: Synthetic oligonucleotide
cagacaugugucugccccc

SEQ ID NO: 161814 - RNA, 19 nt, Artificial Sequence
  Description of Artificial Sequence: Synthetic oligonucleotide
cucuaugugggcaugguuu

SEQ ID NO: 161815 - RNA, 19 nt, Artificial Sequence
  Description of Artificial Sequence: Synthetic oligonucleotide
uugccagugcuucuaagug

SEQ ID NO: 161816 - RNA, 19 nt, Artificial Sequence
  Description of Artificial Sequence: Synthetic oligonucleotide
gcaggagaacaugucaccu

SEQ ID NO: 161817 - RNA, 19 nt, Artificial Sequence
  Description of Artificial Sequence: Synthetic oligonucleotide
ugaggcuaguuuugcauuc

SEQ ID NO: 161818 - RNA, 19 nt, Artificial Sequence
  Description of Artificial Sequence: Synthetic oligonucleotide
caggucccuggcuucguuu

SEQ ID NO: 161819 - RNA, 19 nt, Artificial Sequence
  Description of Artificial Sequence: Synthetic oligonucleotide
ucuuguugguaugccuccc

SEQ ID NO: 161820 - RNA, 19 nt, Artificial Sequence
  Description of Artificial Sequence: Synthetic oligonucleotide
ccagaucguccuuccugua

SEQ ID NO: 161821 - RNA, 19 nt, Artificial Sequence
  Description of Artificial Sequence: Synthetic oligonucleotide
auccaugugaccagacugu

SEQ ID NO: 161822 - RNA, 19 nt, Artificial Sequence
  Description of Artificial Sequence: Synthetic oligonucleotide
uauuuguugggacugucgc

SEQ ID NO: 161823 - RNA, 19 nt, Artificial Sequence
  Description of Artificial Sequence: Synthetic oligonucleotide
cagaucuuggcuucuuaca

SEQ ID NO: 161824 - RNA, 19 nt, Artificial Sequence
  Description of Artificial Sequence: Synthetic oligonucleotide
aguucuuccuguccaaacu

SEQ ID NO: 161825 - RNA, 19 nt, Artificial Sequence
  Description of Artificial Sequence: Synthetic oligonucleotide
uccauccugucccucagga

SEQ ID NO: 161826 - RNA, 19 nt, Artificial Sequence
  Description of Artificial Sequence: Synthetic oligonucleotide
aacggggggaaaauucucc

SEQ ID NO: 161827 - RNA, 19 nt, Artificial Sequence
  Description of Artificial Sequence: Synthetic oligonucleotide
cgaauguuuuugguuuuuu

SEQ ID NO: 161828 - RNA, 19 nt, Artificial Sequence
  Description of Artificial Sequence: Synthetic oligonucleotide
uggcugcuuggaauuuacu

SEQ ID NO: 161829 - RNA, 19 nt, Artificial Sequence
  Description of Artificial Sequence: Synthetic oligonucleotide
uucugccaccugcugguca

SEQ ID NO: 161830 - RNA, 19 nt, Artificial Sequence
  Description of Artificial Sequence: Synthetic oligonucleotide
aucacuguccucacuaagu

SEQ ID NO: 161831 - RNA, 19 nt, Artificial Sequence
  Description of Artificial Sequence: Synthetic oligonucleotide
uggauucuggcucccccgu

SEQ ID NO: 161832 - RNA, 19 nt, Artificial Sequence
  Description of Artificial Sequence: Synthetic oligonucleotide
uaccucauggcucaaacua

SEQ ID NO: 161833 - RNA, 19 nt, Artificial Sequence
  Description of Artificial Sequence: Synthetic oligonucleotide
accacuccucagucgcuau

SEQ ID NO: 161834 - RNA, 19 nt, Artificial Sequence
  Description of Artificial Sequence: Synthetic oligonucleotide
uauuaaagcuuauauuuug

SEQ ID NO: 161835 - RNA, 19 nt, Artificial Sequence
  Description of Artificial Sequence: Synthetic oligonucleotide
gcuggauuacugcuaaaua

SEQ ID NO: 161836 - RNA, 19 nt, Artificial Sequence
  Description of Artificial Sequence: Synthetic oligonucleotide
acaaaagaaaguucaauau

SEQ ID NO: 161837 - RNA, 19 nt, Artificial Sequence
  Description of Artificial Sequence: Synthetic oligonucleotide
uguuuucauuucuguaggg

SEQ ID NO: 161838 - RNA, 19 nt, Artificial Sequence
  Description of Artificial Sequence: Synthetic oligonucleotide
gaaaaugggauugcugcuu

SEQ ID NO: 161839 - RNA, 19 nt, Artificial Sequence
  Description of Artificial Sequence: Synthetic oligonucleotide
uuaaauuucugagcuaggg

SEQ ID NO: 161840 - RNA, 19 nt, Artificial Sequence
  Description of Artificial Sequence: Synthetic oligonucleotide
gauuuuuuggcagcugcag

SEQ ID NO: 161841 - RNA, 19 nt, Artificial Sequence
  Description of Artificial Sequence: Synthetic oligonucleotide
guguuggcgacuauuguaa

SEQ ID NO: 161842 - RNA, 19 nt, Artificial Sequence
  Description of Artificial Sequence: Synthetic oligonucleotide
aaauucucuuuguuucucu

SEQ ID NO: 161843 - RNA, 19 nt, Artificial Sequence
  Description of Artificial Sequence: Synthetic oligonucleotide
ucuguaaauagcaccugcu

SEQ ID NO: 161844 - RNA, 19 nt, Artificial Sequence
  Description of Artificial Sequence: Synthetic oligonucleotide
uaacauuacaauuuguauu

SEQ ID NO: 161845 - RNA, 19 nt, Artificial Sequence
  Description of Artificial Sequence: Synthetic oligonucleotide
uuauguuuaaagaaggcau

SEQ ID NO: 161846 - RNA, 19 nt, Artificial Sequence
  Description of Artificial Sequence: Synthetic oligonucleotide
ucauuuggugaacagaacu

SEQ ID NO: 161847 - RNA, 19 nt, Artificial Sequence
  Description of Artificial Sequence: Synthetic oligonucleotide
uaggaaaugaauuuuuagc

SEQ ID NO: 161848 - RNA, 19 nt, Artificial Sequence
  Description of Artificial Sequence: Synthetic oligonucleotide
cucuuaaaagcauuugcuu

SEQ ID NO: 161849 - RNA, 19 nt, Artificial Sequence
  Description of Artificial Sequence: Synthetic oligonucleotide
uugagaccgcacaggagug

SEQ ID NO: 161850 - RNA, 19 nt, Artificial Sequence
  Description of Artificial Sequence: Synthetic oligonucleotide
gucuuuccuuguaaaacag

SEQ ID NO: 161851 - RNA, 19 nt, Artificial Sequence
  Description of Artificial Sequence: Synthetic oligonucleotide
gugaugauaauuucugccu

SEQ ID NO: 161852 - RNA, 19 nt, Artificial Sequence
  Description of Artificial Sequence: Synthetic oligonucleotide
uuggcccuaccuugaagca

SEQ ID NO: 161853 - RNA, 19 nt, Artificial Sequence
  Description of Artificial Sequence: Synthetic oligonucleotide
aauguugugugaagggaug

SEQ ID NO: 161854 - RNA, 19 nt, Artificial Sequence
  Description of Artificial Sequence: Synthetic oligonucleotide
gaagaaucuaaaagucuuc

SEQ ID NO: 161855 - RNA, 19 nt, Artificial Sequence
  Description of Artificial Sequence: Synthetic oligonucleotide
cauaaguccuugggagagg

SEQ ID NO: 161856 - RNA, 19 nt, Artificial Sequence
  Description of Artificial Sequence: Synthetic oligonucleotide
gugcuagaaaaauauaagg

SEQ ID NO: 161857 - RNA, 19 nt, Artificial Sequence
  Description of Artificial Sequence: Synthetic oligonucleotide
gcacuaucauaauuacagu

SEQ ID NO: 161858 - RNA, 19 nt, Artificial Sequence
  Description of Artificial Sequence: Synthetic oligonucleotide
ugauguccuugcuguuacu

SEQ ID NO: 161859 - RNA, 19 nt, Artificial Sequence
  Description of Artificial Sequence: Synthetic oligonucleotide
uacucaaaucacccacaaa

SEQ ID NO: 161860 - RNA, 19 nt, Artificial Sequence
  Description of Artificial Sequence: Synthetic oligonucleotide
auuuccccaaagacugcgc

SEQ ID NO: 161861 - RNA, 19 nt, Artificial Sequence
  Description of Artificial Sequence: Synthetic oligonucleotide
cuagcugucaaauaaaaga

SEQ ID NO: 161862 - RNA, 19 nt, Artificial Sequence
  Description of Artificial Sequence: Synthetic oligonucleotide
acagugaaauugaccugaa

SEQ ID NO: 161863 - RNA, 19 nt, Artificial Sequence
  Description of Artificial Sequence: Synthetic oligonucleotide
aagguaaucauggcaccag

SEQ ID NO: 161864 - RNA, 19 nt, Artificial Sequence
  Description of Artificial Sequence: Synthetic oligonucleotide
gucuucgugggccagucua

SEQ ID NO: 161865 - RNA, 19 nt, Artificial Sequence
  Description of Artificial Sequence: Synthetic oligonucleotide
acugggaaggagaccacug

SEQ ID NO: 161866 - RNA, 19 nt, Artificial Sequence
  Description of Artificial Sequence: Synthetic oligonucleotide
gucucgggggcucaaguuc

SEQ ID NO: 161867 - RNA, 19 nt, Artificial Sequence
  Description of Artificial Sequence: Synthetic oligonucleotide
ccugugggcaggcucaguu

SEQ ID NO: 161868 - RNA, 19 nt, Artificial Sequence
  Description of Artificial Sequence: Synthetic oligonucleotide
ugcccccgaaugggaucau

SEQ ID NO: 161869 - RNA, 19 nt, Artificial Sequence
  Description of Artificial Sequence: Synthetic oligonucleotide
uuccucacgcuucaggcac

SEQ ID NO: 161870 - RNA, 19 nt, Artificial Sequence
  Description of Artificial Sequence: Synthetic oligonucleotide
cacacacuccaucucagua

SEQ ID NO: 161871 - RNA, 19 nt, Artificial Sequence
  Description of Artificial Sequence: Synthetic oligonucleotide
agggaucuagccacauccc

SEQ ID NO: 161872 - RNA, 19 nt, Artificial Sequence
  Description of Artificial Sequence: Synthetic oligonucleotide
cccaggacuaguaacagag

SEQ ID NO: 161873 - RNA, 19 nt, Artificial Sequence
  Description of Artificial Sequence: Synthetic oligonucleotide
ggucacaaaguggagguga

SEQ ID NO: 161874 - RNA, 19 nt, Artificial Sequence
  Description of Artificial Sequence: Synthetic oligonucleotide
agcugggaacagagggcug

SEQ ID NO: 161875 - RNA, 19 nt, Artificial Sequence
  Description of Artificial Sequence: Synthetic oligonucleotide
gcagggauggguggugcug

SEQ ID NO: 161876 - RNA, 19 nt, Artificial Sequence
  Description of Artificial Sequence: Synthetic oligonucleotide
ggucuguaauaagcuuuga

SEQ ID NO: 161877 - RNA, 19 nt, Artificial Sequence
  Description of Artificial Sequence: Synthetic oligonucleotide
agagcaacgucacuggggc

SEQ ID NO: 161878 - RNA, 19 nt, Artificial Sequence
  Description of Artificial Sequence: Synthetic oligonucleotide
cuuuggggucagcuacaca

SEQ ID NO: 161879 - RNA, 19 nt, Artificial Sequence
  Description of Artificial Sequence: Synthetic oligonucleotide
aaggaaggcauuuggaccc

SEQ ID NO: 161880 - RNA, 19 nt, Artificial Sequence
  Description of Artificial Sequence: Synthetic oligonucleotide
ccugccuuuucauugcccg

SEQ ID NO: 161881 - RNA, 19 nt, Artificial Sequence
  Description of Artificial Sequence: Synthetic oligonucleotide
gaaaccagagccuuuccac

SEQ ID NO: 161882 - RNA, 19 nt, Artificial Sequence
  Description of Artificial Sequence: Synthetic oligonucleotide
ccaagcguuucccagucuu

SEQ ID NO: 161883 - RNA, 19 nt, Artificial Sequence
  Description of Artificial Sequence: Synthetic oligonucleotide
uagcccuguguccugaguu

SEQ ID NO: 161884 - RNA, 19 nt, Artificial Sequence
  Description of Artificial Sequence: Synthetic oligonucleotide
uacguacgaucuuucuggc

SEQ ID NO: 161885 - RNA, 19 nt, Artificial Sequence
  Description of Artificial Sequence: Synthetic oligonucleotide
caaauggggugcaugauaa

SEQ ID NO: 161886 - RNA, 19 nt, Artificial Sequence
  Description of Artificial Sequence: Synthetic oligonucleotide
agagcaucucuuacgaaga

SEQ ID NO: 161887 - RNA, 19 nt, Artificial Sequence
  Description of Artificial Sequence: Synthetic oligonucleotide
aguuggaaaaacaaaugcc

SEQ ID NO: 161888 - RNA, 19 nt, Artificial Sequence
  Description of Artificial Sequence: Synthetic oligonucleotide
cauauauaaauucuaagcc

SEQ ID NO: 161889 - RNA, 19 nt, Artificial Sequence
  Description of Artificial Sequence: Synthetic oligonucleotide
cauaugaggacgaggagua

SEQ ID NO: 161890 - RNA, 19 nt, Artificial Sequence
  Description of Artificial Sequence: Synthetic oligonucleotide
aauggcauuuucuuccuuu

SEQ ID NO: 161891 - RNA, 19 nt, Artificial Sequence
  Description of Artificial Sequence: Synthetic oligonucleotide
uuuccucucacucccagac

SEQ ID NO: 161892 - RNA, 19 nt, Artificial Sequence
  Description of Artificial Sequence: Synthetic oligonucleotide
cauucauugucccugaaug

SEQ ID NO: 161893 - RNA, 19 nt, Artificial Sequence
  Description of Artificial Sequence: Synthetic oligonucleotide
gcuccauuaauccagggaa

SEQ ID NO: 161894 - RNA, 19 nt, Artificial Sequence
  Description of Artificial Sequence: Synthetic oligonucleotide
agguaauugccuaaaucuc

SEQ ID NO: 161895 - RNA, 19 nt, Artificial Sequence
  Description of Artificial Sequence: Synthetic oligonucleotide
ccaguggaucucgcaacag

SEQ ID NO: 161896 - RNA, 19 nt, Artificial Sequence
  Description of Artificial Sequence: Synthetic oligonucleotide
ggaaggaaccagaagcugg

SEQ ID NO: 161897 - RNA, 19 nt, Artificial Sequence
  Description of Artificial Sequence: Synthetic oligonucleotide
ggaaaguuguuuaccucuu

SEQ ID NO: 161898 - RNA, 19 nt, Artificial Sequence
  Description of Artificial Sequence: Synthetic oligonucleotide
uugucccagaguuagaccu

SEQ ID NO: 161899 - RNA, 19 nt, Artificial Sequence
  Description of Artificial Sequence: Synthetic oligonucleotide
ucauccuccccuagcuuag

SEQ ID NO: 161900 - RNA, 19 nt, Artificial Sequence
  Description of Artificial Sequence: Synthetic oligonucleotide
gcugucucagagauauacu

SEQ ID NO: 161901 - RNA, 19 nt, Artificial Sequence
  Description of Artificial Sequence: Synthetic oligonucleotide
uggcccucccuucucuucu

SEQ ID NO: 161902 - RNA, 19 nt, Artificial Sequence
  Description of Artificial Sequence: Synthetic oligonucleotide
ucuuugcugcuggugcuaa

SEQ ID NO: 161903 - RNA, 19 nt, Artificial Sequence
  Description of Artificial Sequence: Synthetic oligonucleotide
aaacugcucuguaggucau

SEQ ID NO: 161904 - RNA, 19 nt, Artificial Sequence
  Description of Artificial Sequence: Synthetic oligonucleotide
uuggccacugucuccacuc

SEQ ID NO: 161905 - RNA, 19 nt, Artificial Sequence
  Description of Artificial Sequence: Synthetic oligonucleotide
cacaaccccugcuccaguc

SEQ ID NO: 161906 - RNA, 19 nt, Artificial Sequence
  Description of Artificial Sequence: Synthetic oligonucleotide
ccuggagggaguggguuaa

SEQ ID NO: 161907 - RNA, 19 nt, Artificial Sequence
  Description of Artificial Sequence: Synthetic oligonucleotide
aacacaaauagaacauucc

SEQ ID NO: 161908 - RNA, 19 nt, Artificial Sequence
  Description of Artificial Sequence: Synthetic oligonucleotide
cauuugaagcagugauucu

SEQ ID NO: 161909 - RNA, 19 nt, Artificial Sequence
  Description of Artificial Sequence: Synthetic oligonucleotide
uuuaaucaaaugcuuugga

SEQ ID NO: 161910 - RNA, 19 nt, Artificial Sequence
  Description of Artificial Sequence: Synthetic oligonucleotide
acuuuugaaguccacuugu

SEQ ID NO: 161911 - RNA, 19 nt, Artificial Sequence
  Description of Artificial Sequence: Synthetic oligonucleotide
uucuguacuuguaaaaggg

SEQ ID NO: 161912 - RNA, 19 nt, Artificial Sequence
  Description of Artificial Sequence: Synthetic oligonucleotide
gaaagaaggccgggcgcag

SEQ ID NO: 161913 - RNA, 19 nt, Artificial Sequence
  Description of Artificial Sequence: Synthetic oligonucleotide
guggcucacgccuguaauc

SEQ ID NO: 161914 - RNA, 19 nt, Artificial Sequence
  Description of Artificial Sequence: Synthetic oligonucleotide
cccagcacuuuagaucacu

SEQ ID NO: 161915 - RNA, 19 nt, Artificial Sequence
  Description of Artificial Sequence: Synthetic oligonucleotide
uugaggucaggaguuugag

SEQ ID NO: 161916 - RNA, 19 nt, Artificial Sequence
  Description of Artificial Sequence: Synthetic oligonucleotide
gaccagcccggccaacaug

SEQ ID NO: 161917 - RNA, 19 nt, Artificial Sequence
  Description of Artificial Sequence: Synthetic oligonucleotide
ggugaaaccccaucucuac

SEQ ID NO: 161918 - RNA, 19 nt, Artificial Sequence
  Description of Artificial Sequence: Synthetic oligonucleotide
cuaaaaauacaaaaauuag

SEQ ID NO: 161919 - RNA, 19 nt, Artificial Sequence
  Description of Artificial Sequence: Synthetic oligonucleotide
gcugugcauagugguuggc

SEQ ID NO: 161920 - RNA, 19 nt, Artificial Sequence
  Description of Artificial Sequence: Synthetic oligonucleotide
caccuguagucccagcuac

SEQ ID NO: 161921 - RNA, 19 nt, Artificial Sequence
  Description of Artificial Sequence: Synthetic oligonucleotide
cucaggaggcugaggcaag

SEQ ID NO: 161922 - RNA, 19 nt, Artificial Sequence
  Description of Artificial Sequence: Synthetic oligonucleotide
gcuaacugcuugaacccag

SEQ ID NO: 161923 - RNA, 19 nt, Artificial Sequence
  Description of Artificial Sequence: Synthetic oligonucleotide
gaaggcagagguugcagug

SEQ ID NO: 161924 - RNA, 19 nt, Artificial Sequence
  Description of Artificial Sequence: Synthetic oligonucleotide
gagcugagaucacgccacu

SEQ ID NO: 161925 - RNA, 19 nt, Artificial Sequence
  Description of Artificial Sequence: Synthetic oligonucleotide
ugcacuccagccuggguga

SEQ ID NO: 161926 - RNA, 19 nt, Artificial Sequence
  Description of Artificial Sequence: Synthetic oligonucleotide
acagagugagugagacucu

SEQ ID NO: 161927 - RNA, 19 nt, Artificial Sequence
  Description of Artificial Sequence: Synthetic oligonucleotide
aucuugaagguaaucaugg

SEQ ID NO: 161928 - RNA, 19 nt, Artificial Sequence
  Description of Artificial Sequence: Synthetic oligonucleotide
gcaccagucuucgugggcc

SEQ ID NO: 161929 - RNA, 19 nt, Artificial Sequence
  Description of Artificial Sequence: Synthetic oligonucleotide
cagucuacugggaaggaga

SEQ ID NO: 161930 - RNA, 19 nt, Artificial Sequence
  Description of Artificial Sequence: Synthetic oligonucleotide
accacugucucgggggcuc

SEQ ID NO: 161931 - RNA, 19 nt, Artificial Sequence
  Description of Artificial Sequence: Synthetic oligonucleotide
caaguuccugugggcaggc

SEQ ID NO: 161932 - RNA, 19 nt, Artificial Sequence
  Description of Artificial Sequence: Synthetic oligonucleotide
cucaguugcccccgaaugg

SEQ ID NO: 161933 - RNA, 19 nt, Artificial Sequence
  Description of Artificial Sequence: Synthetic oligonucleotide
ggaucauuccucacgcuuc

SEQ ID NO: 161934 - RNA, 19 nt, Artificial Sequence
  Description of Artificial Sequence: Synthetic oligonucleotide
caggcacacacacuccauc

SEQ ID NO: 161935 - RNA, 19 nt, Artificial Sequence
  Description of Artificial Sequence: Synthetic oligonucleotide
cucaguagggaucuagcca

SEQ ID NO: 161936 - RNA, 19 nt, Artificial Sequence
  Description of Artificial Sequence: Synthetic oligonucleotide
acaucccccaggacuagua

SEQ ID NO: 161937 - RNA, 19 nt, Artificial Sequence
  Description of Artificial Sequence: Synthetic oligonucleotide
aacagaggucacaaagugg

SEQ ID NO: 161938 - RNA, 19 nt, Artificial Sequence
  Description of Artificial Sequence: Synthetic oligonucleotide
gaggugagcugggaacaga

SEQ ID NO: 161939 - RNA, 19 nt, Artificial Sequence
  Description of Artificial Sequence: Synthetic oligonucleotide
agggcugcagggaugggug

SEQ ID NO: 161940 - RNA, 19 nt, Artificial Sequence
  Description of Artificial Sequence: Synthetic oligonucleotide
ggugcuggucuguaauaag

SEQ ID NO: 161941 - RNA, 19 nt, Artificial Sequence
  Description of Artificial Sequence: Synthetic oligonucleotide
gcuuugagagcaacgucac

SEQ ID NO: 161942 - RNA, 19 nt, Artificial Sequence
  Description of Artificial Sequence: Synthetic oligonucleotide
cuggggcuuuggggucagc

SEQ ID NO: 161943 - RNA, 19 nt, Artificial Sequence
  Description of Artificial Sequence: Synthetic oligonucleotide
cuacacaaggaaggcauuu

SEQ ID NO: 161944 - RNA, 19 nt, Artificial Sequence
  Description of Artificial Sequence: Synthetic oligonucleotide
uggaccccugccuuuucau

SEQ ID NO: 161945 - RNA, 19 nt, Artificial Sequence
  Description of Artificial Sequence: Synthetic oligonucleotide
uugcccgaaaccagagccu

SEQ ID NO: 161946 - RNA, 19 nt, Artificial Sequence
  Description of Artificial Sequence: Synthetic oligonucleotide
uuuccaccaagcguuuccc

SEQ ID NO: 161947 - RNA, 19 nt, Artificial Sequence
  Description of Artificial Sequence: Synthetic oligonucleotide
cagucuuagcccugugucc

SEQ ID NO: 161948 - RNA, 19 nt, Artificial Sequence
  Description of Artificial Sequence: Synthetic oligonucleotide
cugaguuacguacgaucuu

SEQ ID NO: 161949 - RNA, 19 nt, Artificial Sequence
  Description of Artificial Sequence: Synthetic oligonucleotide
uucuggcaaauggggugca

SEQ ID NO: 161950 - RNA, 19 nt, Artificial Sequence
  Description of Artificial Sequence: Synthetic oligonucleotide
augauaagagcaucucuua

SEQ ID NO: 161951 - RNA, 19 nt, Artificial Sequence
  Description of Artificial Sequence: Synthetic oligonucleotide
acgaagaguuggaaaaaca

SEQ ID NO: 161952 - RNA, 19 nt, Artificial Sequence
  Description of Artificial Sequence: Synthetic oligonucleotide
aaaugccauauauaaauuc

SEQ ID NO: 161953 - RNA, 19 nt, Artificial Sequence
  Description of Artificial Sequence: Synthetic oligonucleotide
cuaagccauaugaggacga

SEQ ID NO: 161954 - RNA, 19 nt, Artificial Sequence
  Description of Artificial Sequence: Synthetic oligonucleotide
aggaguaauggcauuuucu

SEQ ID NO: 161955 - RNA, 19 nt, Artificial Sequence
  Description of Artificial Sequence: Synthetic oligonucleotide
uuccuuuuuccucucacuc

SEQ ID NO: 161956 - RNA, 19 nt, Artificial Sequence
  Description of Artificial Sequence: Synthetic oligonucleotide
cccagacauucauuguccc

SEQ ID NO: 161957 - RNA, 19 nt, Artificial Sequence
  Description of Artificial Sequence: Synthetic oligonucleotide
cugaaugcuccauuaaucc

SEQ ID NO: 161958 - RNA, 19 nt, Artificial Sequence
  Description of Artificial Sequence: Synthetic oligonucleotide
cagggaagguaauugccua

SEQ ID NO: 161959 - RNA, 19 nt, Artificial Sequence
  Description of Artificial Sequence: Synthetic oligonucleotide
aaaucuccaguggaucucg

SEQ ID NO: 161960 - RNA, 19 nt, Artificial Sequence
  Description of Artificial Sequence: Synthetic oligonucleotide
gcaacaggaaggaaccaga

SEQ ID NO: 161961 - RNA, 19 nt, Artificial Sequence
  Description of Artificial Sequence: Synthetic oligonucleotide
aagcugggaaaguuguuua

SEQ ID NO: 161962 - RNA, 19 nt, Artificial Sequence
  Description of Artificial Sequence: Synthetic oligonucleotide
accucuuugucccagaguu

SEQ ID NO: 161963 - RNA, 19 nt, Artificial Sequence
  Description of Artificial Sequence: Synthetic oligonucleotide
uagaccucauccuccccua

SEQ ID NO: 161964 - RNA, 19 nt, Artificial Sequence
  Description of Artificial Sequence: Synthetic oligonucleotide
agcuuagcugucucagaga

SEQ ID NO: 161965 - RNA, 19 nt, Artificial Sequence
  Description of Artificial Sequence: Synthetic oligonucleotide
auauacuggcccucccuuc

SEQ ID NO: 161966 - RNA, 19 nt, Artificial Sequence
  Description of Artificial Sequence: Synthetic oligonucleotide
cucuucucuuugcugcugg

SEQ ID NO: 161967 - RNA, 19 nt, Artificial Sequence
  Description of Artificial Sequence: Synthetic oligonucleotide
gugcuaaaacugcucugua

SEQ ID NO: 161968 - RNA, 19 nt, Artificial Sequence
  Description of Artificial Sequence: Synthetic oligonucleotide
aggucauuggccacugucu

SEQ ID NO: 161969 - RNA, 19 nt, Artificial Sequence
  Description of Artificial Sequence: Synthetic oligonucleotide
uccacucacaaccccugcu

SEQ ID NO: 161970 - RNA, 19 nt, Artificial Sequence
  Description of Artificial Sequence: Synthetic oligonucleotide
uccaguccuggagggagug

SEQ ID NO: 161971 - RNA, 19 nt, Artificial Sequence
  Description of Artificial Sequence: Synthetic oligonucleotide
ggguuaaacacaaauagaa

SEQ ID NO: 161972 - RNA, 19 nt, Artificial Sequence
  Description of Artificial Sequence: Synthetic oligonucleotide
acauuccauuugaagcagu

SEQ ID NO: 161973 - RNA, 19 nt, Artificial Sequence
  Description of Artificial Sequence: Synthetic oligonucleotide
uuuuuuuuuaaucaaaugc

SEQ ID NO: 161974 - RNA, 19 nt, Artificial Sequence
  Description of Artificial Sequence: Synthetic oligonucleotide
cuuuggacuuuugaagucc

SEQ ID NO: 161975 - RNA, 19 nt, Artificial Sequence
  Description of Artificial Sequence: Synthetic oligonucleotide
cacuuguucuguacuugua

SEQ ID NO: 161976 - RNA, 19 nt, Artificial Sequence
  Description of Artificial Sequence: Synthetic oligonucleotide
aaaagggaaagaaggccgg

SEQ ID NO: 161977 - RNA, 19 nt, Artificial Sequence
  Description of Artificial Sequence: Synthetic oligonucleotide
ggcgcaguggcucacgccu

SEQ ID NO: 161978 - RNA, 19 nt, Artificial Sequence
  Description of Artificial Sequence: Synthetic oligonucleotide
uguaaucccagcacuuuag

SEQ ID NO: 161979 - RNA, 19 nt, Artificial Sequence
  Description of Artificial Sequence: Synthetic oligonucleotide
gaucacuugaggucaggag

SEQ ID NO: 161980 - RNA, 19 nt, Artificial Sequence
  Description of Artificial Sequence: Synthetic oligonucleotide
guuugagaccagcccggcc

SEQ ID NO: 161981 - RNA, 19 nt, Artificial Sequence
  Description of Artificial Sequence: Synthetic oligonucleotide
caacauggugaaaccccau

SEQ ID NO: 161982 - RNA, 19 nt, Artificial Sequence
  Description of Artificial Sequence: Synthetic oligonucleotide
ucucuacuaaaaauacaaa

SEQ ID NO: 161983 - RNA, 19 nt, Artificial Sequence
  Description of Artificial Sequence: Synthetic oligonucleotide
aaauuagcugugcauagug

SEQ ID NO: 161984 - RNA, 19 nt, Artificial Sequence
  Description of Artificial Sequence: Synthetic oligonucleotide
gguuggcaccuguaguccc

SEQ ID NO: 161985 - RNA, 19 nt, Artificial Sequence
  Description of Artificial Sequence: Synthetic oligonucleotide
cagcuacucaggaggcuga

SEQ ID NO: 161986 - RNA, 19 nt, Artificial Sequence
  Description of Artificial Sequence: Synthetic oligonucleotide
aggcaagcuaacugcuuga

SEQ ID NO: 161987 - RNA, 19 nt, Artificial Sequence
  Description of Artificial Sequence: Synthetic oligonucleotide
aacccagaaggcagagguu

SEQ ID NO: 161988 - RNA, 19 nt, Artificial Sequence
  Description of Artificial Sequence: Synthetic oligonucleotide
ugcagugagcugagaucac

SEQ ID NO: 161989 - RNA, 19 nt, Artificial Sequence
  Description of Artificial Sequence: Synthetic oligonucleotide
cgccacugcacuccagccu

SEQ ID NO: 161990 - RNA, 19 nt, Artificial Sequence
  Description of Artificial Sequence: Synthetic oligonucleotide
ugggugacagagugaguga

SEQ ID NO: 161991 - RNA, 19 nt, Artificial Sequence
  Description of Artificial Sequence: Synthetic oligonucleotide
agacucugcguuaaaaaaa

SEQ ID NO: 161992 - RNA, 25 nt, Artificial Sequence
  Description of Artificial Sequence: Synthetic oligonucleotide
agaugcaggggcgcaaacgccaaag

SEQ ID NO: 161993 - RNA, 25 nt, Artificial Sequence
  Description of Artificial Sequence: Synthetic oligonucleotide
ggagaccaggcuguaggaagagaag

SEQ ID NO: 161994 - RNA, 25 nt, Artificial Sequence
  Description of Artificial Sequence: Synthetic oligonucleotide
gggcagagcgccggacagcucggcc

SEQ ID NO: 161995 - RNA, 25 nt, Artificial Sequence
  Description of Artificial Sequence: Synthetic oligonucleotide
ccgcuccccguccuuuggggccgcg

SEQ ID NO: 161996 - RNA, 25 nt, Artificial Sequence
  Description of Artificial Sequence: Synthetic oligonucleotide
ggcuggggaacuacaaggcccagca

SEQ ID NO: 161997 - RNA, 25 nt, Artificial Sequence
  Description of Artificial Sequence: Synthetic oligonucleotide
aggcagcugcagggggcggaggcgg

SEQ ID NO: 161998 - RNA, 25 nt, Artificial Sequence
  Description of Artificial Sequence: Synthetic oligonucleotide
gaggagggaccagcgcgggugggag

SEQ ID NO: 161999 - RNA, 25 nt, Artificial Sequence
  Description of Artificial Sequence: Synthetic oligonucleotide
gugagagagcgagcccucgcgcccc

SEQ ID NO: 162000 - RNA, 25 nt, Artificial Sequence
  Description of Artificial Sequence: Synthetic oligonucleotide
cgccggcgcauagcgcucggagcgc

SEQ ID NO: 162001 - RNA, 25 nt, Artificial Sequence
  Description of Artificial Sequence: Synthetic oligonucleotide
cucuugcggccacaggcgcggcguc

SEQ ID NO: 162002 - RNA, 25 nt, Artificial Sequence
  Description of Artificial Sequence: Synthetic oligonucleotide
ccucggcggcgggcggcagcuagcg

SEQ ID NO: 162003 - RNA, 25 nt, Artificial Sequence
  Description of Artificial Sequence: Synthetic oligonucleotide
gggagccgggacgccggugcagccg

SEQ ID NO: 162004 - RNA, 25 nt, Artificial Sequence
  Description of Artificial Sequence: Synthetic oligonucleotide
gcagcgcgcggaggaacccgggugu

SEQ ID NO: 162005 - RNA, 25 nt, Artificial Sequence
  Description of Artificial Sequence: Synthetic oligonucleotide
ugccgggagcugggcggccacgucc

SEQ ID NO: 162006 - RNA, 25 nt, Artificial Sequence
  Description of Artificial Sequence: Synthetic oligonucleotide
cggacgggaccgagaccccucguag

SEQ ID NO: 162007 - RNA, 25 nt, Artificial Sequence
  Description of Artificial Sequence: Synthetic oligonucleotide
gcgcauugcggcgaccucgccuucc

SEQ ID NO: 162008 - RNA, 25 nt, Artificial Sequence
  Description of Artificial Sequence: Synthetic oligonucleotide
cccggccgcgagcgcgccgcugcuu

SEQ ID NO: 162009 - RNA, 25 nt, Artificial Sequence
  Description of Artificial Sequence: Synthetic oligonucleotide
ugaaaagccgcggaacccaaggacu

SEQ ID NO: 162010 - RNA, 25 nt, Artificial Sequence
  Description of Artificial Sequence: Synthetic oligonucleotide
uuuucuccgguccgagcucggggcg

SEQ ID NO: 162011 - RNA, 25 nt, Artificial Sequence
  Description of Artificial Sequence: Synthetic oligonucleotide
gccccgcagggcgcacgguacccgu

SEQ ID NO: 162012 - RNA, 25 nt, Artificial Sequence
  Description of Artificial Sequence: Synthetic oligonucleotide
ugcugcagucgggcacgccgcggcg

SEQ ID NO: 162013 - RNA, 25 nt, Artificial Sequence
  Description of Artificial Sequence: Synthetic oligonucleotide
gccggggccuccgcagggcgaugga

SEQ ID NO: 162014 - RNA, 25 nt, Artificial Sequence
  Description of Artificial Sequence: Synthetic oligonucleotide
agcccggucugcaaggaaagugagg

SEQ ID NO: 162015 - RNA, 25 nt, Artificial Sequence
  Description of Artificial Sequence: Synthetic oligonucleotide
gcgccgccgcugcguucuggaggag

SEQ ID NO: 162016 - RNA, 25 nt, Artificial Sequence
  Description of Artificial Sequence: Synthetic oligonucleotide
ggggggcacaaggucuggagacccc

SEQ ID NO: 162017 - RNA, 25 nt, Artificial Sequence
  Description of Artificial Sequence: Synthetic oligonucleotide
cggguggcggacgggagcccucccc

SEQ ID NO: 162018 - RNA, 25 nt, Artificial Sequence
  Description of Artificial Sequence: Synthetic oligonucleotide
cccgccccgccuccggggcaccagc

SEQ ID NO: 162019 - RNA, 25 nt, Artificial Sequence
  Description of Artificial Sequence: Synthetic oligonucleotide
cuccggcuccauuguucccgcccgg

SEQ ID NO: 162020 - RNA, 25 nt, Artificial Sequence
  Description of Artificial Sequence: Synthetic oligonucleotide
ggcuggaggcgccgagcaccgagcg

SEQ ID NO: 162021 - RNA, 25 nt, Artificial Sequence
  Description of Artificial Sequence: Synthetic oligonucleotide
gccgccgggagucgagcgccggccg

SEQ ID NO: 162022 - RNA, 25 nt, Artificial Sequence
  Description of Artificial Sequence: Synthetic oligonucleotide
gcggagcucuugcgaccccgccagg

SEQ ID NO: 162023 - RNA, 25 nt, Artificial Sequence
  Description of Artificial Sequence: Synthetic oligonucleotide
gacccgaacagagcccgggggcggc

SEQ ID NO: 162024 - RNA, 25 nt, Artificial Sequence
  Description of Artificial Sequence: Synthetic oligonucleotide
cgggccggagccggggacgcgggca

SEQ ID NO: 162025 - RNA, 25 nt, Artificial Sequence
  Description of Artificial Sequence: Synthetic oligonucleotide
acacgcccgcucgcacaagccacgg

SEQ ID NO: 162026 - RNA, 25 nt, Artificial Sequence
  Description of Artificial Sequence: Synthetic oligonucleotide
gcggacucucccgaggcggaaccuc

SEQ ID NO: 162027 - RNA, 25 nt, Artificial Sequence
  Description of Artificial Sequence: Synthetic oligonucleotide
ccacgccgagcgagggucaguuuga

SEQ ID NO: 162028 - RNA, 25 nt, Artificial Sequence
  Description of Artificial Sequence: Synthetic oligonucleotide
aaaaggaggaucgagcucacugugg

SEQ ID NO: 162029 - RNA, 25 nt, Artificial Sequence
  Description of Artificial Sequence: Synthetic oligonucleotide
gaguauccauggagauguggagccu

SEQ ID NO: 162030 - RNA, 25 nt, Artificial Sequence
  Description of Artificial Sequence: Synthetic oligonucleotide
uugucaccaaccucuaacugcagaa

SEQ ID NO: 162031 - RNA, 25 nt, Artificial Sequence
  Description of Artificial Sequence: Synthetic oligonucleotide
acugggauguggagcuggaagugcc

SEQ ID NO: 162032 - RNA, 25 nt, Artificial Sequence
  Description of Artificial Sequence: Synthetic oligonucleotide
cuccucuucugggcugugcugguca

SEQ ID NO: 162033 - RNA, 25 nt, Artificial Sequence
  Description of Artificial Sequence: Synthetic oligonucleotide
acagccacacucugcaccgcuaggc

SEQ ID NO: 162034 - RNA, 25 nt, Artificial Sequence
  Description of Artificial Sequence: Synthetic oligonucleotide
ccguccccgaccuugccugaacaag

SEQ ID NO: 162035 - RNA, 25 nt, Artificial Sequence
  Description of Artificial Sequence: Synthetic oligonucleotide
gaugcucuccccuccucggaggaug

SEQ ID NO: 162036 - RNA, 25 nt, Artificial Sequence
  Description of Artificial Sequence: Synthetic oligonucleotide
gaugaugaugaugaugacuccucuu

SEQ ID NO: 162037 - RNA, 25 nt, Artificial Sequence
  Description of Artificial Sequence: Synthetic oligonucleotide
ucagaggagaaagaaacagauaaca

SEQ ID NO: 162038 - RNA, 25 nt, Artificial Sequence
  Description of Artificial Sequence: Synthetic oligonucleotide
accaaaccaaaccccguagcuccau

SEQ ID NO: 162039 - RNA, 25 nt, Artificial Sequence
  Description of Artificial Sequence: Synthetic oligonucleotide
uauuggacauccccagaaaagaugg

SEQ ID NO: 162040 - RNA, 25 nt, Artificial Sequence
  Description of Artificial Sequence: Synthetic oligonucleotide
gaaaagaaauugcaugcagugccgg

SEQ ID NO: 162041 - RNA, 25 nt, Artificial Sequence
  Description of Artificial Sequence: Synthetic oligonucleotide
gcugccaagacagugaaguucaaau

SEQ ID NO: 162042 - RNA, 25 nt, Artificial Sequence
  Description of Artificial Sequence: Synthetic oligonucleotide
ugcccuuccagugggaccccaaacc

SEQ ID NO: 162043 - RNA, 25 nt, Artificial Sequence
  Description of Artificial Sequence: Synthetic oligonucleotide
cccacacugcgcugguugaaaaaug

SEQ ID NO: 162044 - RNA, 25 nt, Artificial Sequence
  Description of Artificial Sequence: Synthetic oligonucleotide
ggcaaagaauucaaaccugaccaca

SEQ ID NO: 162045 - RNA, 25 nt, Artificial Sequence
  Description of Artificial Sequence: Synthetic oligonucleotide
agaauuggaggcuacaagguccguu

SEQ ID NO: 162046 - RNA, 25 nt, Artificial Sequence
  Description of Artificial Sequence: Synthetic oligonucleotide
uaugccaccuggagcaucauaaugg

SEQ ID NO: 162047 - RNA, 25 nt, Artificial Sequence
  Description of Artificial Sequence: Synthetic oligonucleotide
gacucuguggugcccucugacaagg

SEQ ID NO: 162048 - RNA, 25 nt, Artificial Sequence
  Description of Artificial Sequence: Synthetic oligonucleotide
ggcaacuacaccugcauuguggaga

SEQ ID NO: 162049 - RNA, 25 nt, Artificial Sequence
  Description of Artificial Sequence: Synthetic oligonucleotide
aaugaguacggcagcaucaaccaca

SEQ ID NO: 162050 - RNA, 25 nt, Artificial Sequence
  Description of Artificial Sequence: Synthetic oligonucleotide
acauaccagcuggaugucguggagc

SEQ ID NO: 162051 - RNA, 25 nt, Artificial Sequence
  Description of Artificial Sequence: Synthetic oligonucleotide
cgguccccucaccggcccauccugc

SEQ ID NO: 162052 - RNA, 25 nt, Artificial Sequence
  Description of Artificial Sequence: Synthetic oligonucleotide
caagcaggguugcccgccaacaaaa

SEQ ID NO: 162053 - RNA, 25 nt, Artificial Sequence
  Description of Artificial Sequence: Synthetic oligonucleotide
acaguggcccuggguagcaacgugg

SEQ ID NO: 162054 - RNA, 25 nt, Artificial Sequence
  Description of Artificial Sequence: Synthetic oligonucleotide
gaguucauguguaagguguacagug

SEQ ID NO: 162055 - RNA, 25 nt, Artificial Sequence
  Description of Artificial Sequence: Synthetic oligonucleotide
gacccgcagccgcacauccaguggc

SEQ ID NO: 162056 - RNA, 25 nt, Artificial Sequence
  Description of Artificial Sequence: Synthetic oligonucleotide
cuaaagcacaucgaggugaauggga

SEQ ID NO: 162057 - RNA, 25 nt, Artificial Sequence
  Description of Artificial Sequence: Synthetic oligonucleotide
agcaagauuggcccagacaaccugc

SEQ ID NO: 162058 - RNA, 25 nt, Artificial Sequence
  Description of Artificial Sequence: Synthetic oligonucleotide
ccuuauguccagaucuugaagacug

SEQ ID NO: 162059 - RNA, 25 nt, Artificial Sequence
  Description of Artificial Sequence: Synthetic oligonucleotide
gcuggaguuaauaccaccgacaaag

SEQ ID NO: 162060 - RNA, 25 nt, Artificial Sequence
  Description of Artificial Sequence: Synthetic oligonucleotide
gagauggaggugcuucacuuaagaa

SEQ ID NO: 162061 - RNA, 25 nt, Artificial Sequence
  Description of Artificial Sequence: Synthetic oligonucleotide
aaugucuccuuugaggacgcagggg

SEQ ID NO: 162062 - RNA, 25 nt, Artificial Sequence
  Description of Artificial Sequence: Synthetic oligonucleotide
gaguauacgugcuuggcggguaacu

SEQ ID NO: 162063 - RNA, 25 nt, Artificial Sequence
  Description of Artificial Sequence: Synthetic oligonucleotide
ucuaucggacucucccaucacucug

SEQ ID NO: 162064 - RNA, 25 nt, Artificial Sequence
  Description of Artificial Sequence: Synthetic oligonucleotide
gcaugguugaccguucuggaagccc

SEQ ID NO: 162065 - RNA, 25 nt, Artificial Sequence
  Description of Artificial Sequence: Synthetic oligonucleotide
cuggaagagaggccggcagugauga

SEQ ID NO: 162066 - RNA, 25 nt, Artificial Sequence
  Description of Artificial Sequence: Synthetic oligonucleotide
accucgccccuguaccuggagauca

SEQ ID NO: 162067 - RNA, 25 nt, Artificial Sequence
  Description of Artificial Sequence: Synthetic oligonucleotide
aucaucuauugcacaggggccuucc

SEQ ID NO: 162068 - RNA, 25 nt, Artificial Sequence
  Description of Artificial Sequence: Synthetic oligonucleotide
cucaucuccugcaugguggggucgg

SEQ ID NO: 162069 - RNA, 25 nt, Artificial Sequence
  Description of Artificial Sequence: Synthetic oligonucleotide
gucaucgucuacaagaugaagagug

SEQ ID NO: 162070 - RNA, 25 nt, Artificial Sequence
  Description of Artificial Sequence: Synthetic oligonucleotide
gguaccaagaagagugacuuccaca

SEQ ID NO: 162071 - RNA, 25 nt, Artificial Sequence
  Description of Artificial Sequence: Synthetic oligonucleotide
agccagauggcugugcacaagcugg

SEQ ID NO: 162072 - RNA, 25 nt, Artificial Sequence
  Description of Artificial Sequence: Synthetic oligonucleotide
gccaagagcaucccucugcgcagac

SEQ ID NO: 162073 - RNA, 25 nt, Artificial Sequence
  Description of Artificial Sequence: Synthetic oligonucleotide
cagguaacagugucugcugacucca

SEQ ID NO: 162074 - RNA, 25 nt, Artificial Sequence
  Description of Artificial Sequence: Synthetic oligonucleotide
agugcauccaugaacucugggguuc

SEQ ID NO: 162075 - RNA, 25 nt, Artificial Sequence
  Description of Artificial Sequence: Synthetic oligonucleotide
cuucugguucggccaucacggcucu

SEQ ID NO: 162076 - RNA, 25 nt, Artificial Sequence
  Description of Artificial Sequence: Synthetic oligonucleotide
uccuccagugggacucccaugcuag

SEQ ID NO: 162077 - RNA, 25 nt, Artificial Sequence
  Description of Artificial Sequence: Synthetic oligonucleotide
gcaggggucucugaguaugagcuuc

SEQ ID NO: 162078 - RNA, 25 nt, Artificial Sequence
  Description of Artificial Sequence: Synthetic oligonucleotide
cccgaagacccucgcugggagcugc

SEQ ID NO: 162079 - RNA, 25 nt, Artificial Sequence
  Description of Artificial Sequence: Synthetic oligonucleotide
ccucgggacagacuggucuuaggca

SEQ ID NO: 162080 - RNA, 25 nt, Artificial Sequence
  Description of Artificial Sequence: Synthetic oligonucleotide
aaaccccugggagagggcugcuuug

SEQ ID NO: 162081 - RNA, 25 nt, Artificial Sequence
  Description of Artificial Sequence: Synthetic oligonucleotide
gggcaggugguguuggcagaggcua

SEQ ID NO: 162082 - RNA, 25 nt, Artificial Sequence
  Description of Artificial Sequence: Synthetic oligonucleotide
aucgggcuggacaaggacaaaccca

SEQ ID NO: 162083 - RNA, 25 nt, Artificial Sequence
  Description of Artificial Sequence: Synthetic oligonucleotide
aaccgugugaccaaaguggcuguga

SEQ ID NO: 162084 - RNA, 25 nt, Artificial Sequence
  Description of Artificial Sequence: Synthetic oligonucleotide
aagauguugaagucggacgcaacag

SEQ ID NO: 162085 - RNA, 25 nt, Artificial Sequence
  Description of Artificial Sequence: Synthetic oligonucleotide
gagaaagacuugucagaccugaucu

SEQ ID NO: 162086 - RNA, 25 nt, Artificial Sequence
  Description of Artificial Sequence: Synthetic oligonucleotide
ucagaaauggagaugaugaagauga

SEQ ID NO: 162087 - RNA, 25 nt, Artificial Sequence
  Description of Artificial Sequence: Synthetic oligonucleotide
aucgggaagcauaagaauaucauca

SEQ ID NO: 162088 - RNA, 25 nt, Artificial Sequence
  Description of Artificial Sequence: Synthetic oligonucleotide
aaccugcugggggccugcacgcagg

SEQ ID NO: 162089 - RNA, 25 nt, Artificial Sequence
  Description of Artificial Sequence: Synthetic oligonucleotide
gauggucccuuguaugucaucgugg

SEQ ID NO: 162090 - RNA, 25 nt, Artificial Sequence
  Description of Artificial Sequence: Synthetic oligonucleotide
gaguaugccuccaagggcaaccugc

SEQ ID NO: 162091 - RNA, 25 nt, Artificial Sequence
  Description of Artificial Sequence: Synthetic oligonucleotide
cgggaguaccugcaggcccggaggc

SEQ ID NO: 162092 - RNA, 25 nt, Artificial Sequence
  Description of Artificial Sequence: Synthetic oligonucleotide
cccccagggcuggaauacugcuaca

SEQ ID NO: 162093 - RNA, 25 nt, Artificial Sequence
  Description of Artificial Sequence: Synthetic oligonucleotide
aaccccagccacaacccagaggagc

SEQ ID NO: 162094 - RNA, 25 nt, Artificial Sequence
  Description of Artificial Sequence: Synthetic oligonucleotide
cagcucuccuccaaggaccuggugu

SEQ ID NO: 162095 - RNA, 25 nt, Artificial Sequence
  Description of Artificial Sequence: Synthetic oligonucleotide
uccugcgccuaccagguggcccgag

SEQ ID NO: 162096 - RNA, 25 nt, Artificial Sequence
  Description of Artificial Sequence: Synthetic oligonucleotide
ggcauggaguaucuggccuccaaga

SEQ ID NO: 162097 - RNA, 25 nt, Artificial Sequence
  Description of Artificial Sequence: Synthetic oligonucleotide
aagugcauacaccgagaccuggcag

SEQ ID NO: 162098 - RNA, 25 nt, Artificial Sequence
  Description of Artificial Sequence: Synthetic oligonucleotide
gccaggaauguccuggugacagagg

SEQ ID NO: 162099 - RNA, 25 nt, Artificial Sequence
  Description of Artificial Sequence: Synthetic oligonucleotide
gacaaugugaugaagauagcagacu

SEQ ID NO: 162100 - RNA, 25 nt, Artificial Sequence
  Description of Artificial Sequence: Synthetic oligonucleotide
uuuggccucgcacgggacauucacc

SEQ ID NO: 162101 - RNA, 25 nt, Artificial Sequence
  Description of Artificial Sequence: Synthetic oligonucleotide
cacaucgacuacuauaaaaagacaa

SEQ ID NO: 162102 - RNA, 25 nt, Artificial Sequence
  Description of Artificial Sequence: Synthetic oligonucleotide
accaacggccgacugccugugaagu

SEQ ID NO: 162103 - RNA, 25 nt, Artificial Sequence
  Description of Artificial Sequence: Synthetic oligonucleotide
uggauggcacccgaggcauuauuug

SEQ ID NO: 162104 - RNA, 25 nt, Artificial Sequence
  Description of Artificial Sequence: Synthetic oligonucleotide
gaccggaucuacacccaccagagug

SEQ ID NO: 162105 - RNA, 25 nt, Artificial Sequence
  Description of Artificial Sequence: Synthetic oligonucleotide
gauguguggucuuucggggugcucc

SEQ ID NO: 162106 - RNA, 25 nt, Artificial Sequence
  Description of Artificial Sequence: Synthetic oligonucleotide
cugugggagaucuucacucugggcg

SEQ ID NO: 162107 - RNA, 25 nt, Artificial Sequence
  Description of Artificial Sequence: Synthetic oligonucleotide
ggcuccccauaccccggugugccug

SEQ ID NO: 162108 - RNA, 25 nt, Artificial Sequence
  Description of Artificial Sequence: Synthetic oligonucleotide
guggaggaacuuuucaagcugcuga

SEQ ID NO: 162109 - RNA, 25 nt, Artificial Sequence
  Description of Artificial Sequence: Synthetic oligonucleotide
aaggagggucaccgcauggacaagc

SEQ ID NO: 162110 - RNA, 25 nt, Artificial Sequence
  Description of Artificial Sequence: Synthetic oligonucleotide
cccaguaacugcaccaacgagcugu

SEQ ID NO: 162111 - RNA, 25 nt, Artificial Sequence
  Description of Artificial Sequence: Synthetic oligonucleotide
uacaugaugaugcgggacugcuggc

SEQ ID NO: 162112 - RNA, 25 nt, Artificial Sequence
  Description of Artificial Sequence: Synthetic oligonucleotide
caugcagugcccucacagagaccca

SEQ ID NO: 162113 - RNA, 25 nt, Artificial Sequence
  Description of Artificial Sequence: Synthetic oligonucleotide
accuucaagcagcugguggaagacc

SEQ ID NO: 162114 - RNA, 25 nt, Artificial Sequence
  Description of Artificial Sequence: Synthetic oligonucleotide
cuggaccgcaucguggccuugaccu

SEQ ID NO: 162115 - RNA, 25 nt, Artificial Sequence
  Description of Artificial Sequence: Synthetic oligonucleotide
uccaaccaggaguaccuggaccugu

SEQ ID NO: 162116 - RNA, 25 nt, Artificial Sequence
  Description of Artificial Sequence: Synthetic oligonucleotide
uccaugccccuggaccaguacuccc

SEQ ID NO: 162117 - RNA, 25 nt, Artificial Sequence
  Description of Artificial Sequence: Synthetic oligonucleotide
cccagcuuucccgacacccggagcu

SEQ ID NO: 162118 - RNA, 25 nt, Artificial Sequence
  Description of Artificial Sequence: Synthetic oligonucleotide
ucuacgugcuccucaggggaggauu

SEQ ID NO: 162119 - RNA, 25 nt, Artificial Sequence
  Description of Artificial Sequence: Synthetic oligonucleotide
uccgucuucucucaugagccgcugc

SEQ ID NO: 162120 - RNA, 25 nt, Artificial Sequence
  Description of Artificial Sequence: Synthetic oligonucleotide
cccgaggagcccugccugccccgac

SEQ ID NO: 162121 - RNA, 25 nt, Artificial Sequence
  Description of Artificial Sequence: Synthetic oligonucleotide
cacccagcccagcuugccaauggcg

SEQ ID NO: 162122 - RNA, 25 nt, Artificial Sequence
  Description of Artificial Sequence: Synthetic oligonucleotide
ggacucaaacgccgcugacugccac

SEQ ID NO: 162123 - RNA, 25 nt, Artificial Sequence
  Description of Artificial Sequence: Synthetic oligonucleotide
cccacacgcccuccccagacuccac

SEQ ID NO: 162124 - RNA, 25 nt, Artificial Sequence
  Description of Artificial Sequence: Synthetic oligonucleotide
ccgucagcuguaacccucacccaca

SEQ ID NO: 162125 - RNA, 25 nt, Artificial Sequence
  Description of Artificial Sequence: Synthetic oligonucleotide
agccccugcugggcccaccaccugu

SEQ ID NO: 162126 - RNA, 25 nt, Artificial Sequence
  Description of Artificial Sequence: Synthetic oligonucleotide
uccgucccuguccccuuuccugcug

SEQ ID NO: 162127 - RNA, 25 nt, Artificial Sequence
  Description of Artificial Sequence: Synthetic oligonucleotide
ggcaggagccggcugccuaccaggg

SEQ ID NO: 162128 - RNA, 25 nt, Artificial Sequence
  Description of Artificial Sequence: Synthetic oligonucleotide
ggccuuccuguguggccugccuuca

SEQ ID NO: 162129 - RNA, 25 nt, Artificial Sequence
  Description of Artificial Sequence: Synthetic oligonucleotide
accccacucagcucaccucucccuc

SEQ ID NO: 162130 - RNA, 25 nt, Artificial Sequence
  Description of Artificial Sequence: Synthetic oligonucleotide
ccaccuccucuccaccugcugguga

SEQ ID NO: 162131 - RNA, 25 nt, Artificial Sequence
  Description of Artificial Sequence: Synthetic oligonucleotide
agaggugcaaagaggcagaucuuug

SEQ ID NO: 162132 - RNA, 25 nt, Artificial Sequence
  Description of Artificial Sequence: Synthetic oligonucleotide
gcugccagccacuucauccccuccc

SEQ ID NO: 162133 - RNA, 25 nt, Artificial Sequence
  Description of Artificial Sequence: Synthetic oligonucleotide
cagauguuggaccaacaccccuccc

SEQ ID NO: 162134 - RNA, 25 nt, Artificial Sequence
  Description of Artificial Sequence: Synthetic oligonucleotide
cugccaccaggcacugccuggaggg

SEQ ID NO: 162135 - RNA, 25 nt, Artificial Sequence
  Description of Artificial Sequence: Synthetic oligonucleotide
gcagggagugggagccaaugaacag

SEQ ID NO: 162136 - RNA, 25 nt, Artificial Sequence
  Description of Artificial Sequence: Synthetic oligonucleotide
ggcaugcaagugagagcuuccugag

SEQ ID NO: 162137 - RNA, 25 nt, Artificial Sequence
  Description of Artificial Sequence: Synthetic oligonucleotide
gcuuucuccugucgguuuggucugu

SEQ ID NO: 162138 - RNA, 25 nt, Artificial Sequence
  Description of Artificial Sequence: Synthetic oligonucleotide
uuuugccuucacccauaagccccuc

SEQ ID NO: 162139 - RNA, 25 nt, Artificial Sequence
  Description of Artificial Sequence: Synthetic oligonucleotide
cgcacucugguggcaggugccuugu

SEQ ID NO: 162140 - RNA, 25 nt, Artificial Sequence
  Description of Artificial Sequence: Synthetic oligonucleotide
uccucagggcuacagcaguagggag

SEQ ID NO: 162141 - RNA, 25 nt, Artificial Sequence
  Description of Artificial Sequence: Synthetic oligonucleotide
ggucagugcuucgugccucgauuga

SEQ ID NO: 162142 - RNA, 25 nt, Artificial Sequence
  Description of Artificial Sequence: Synthetic oligonucleotide
aaggugaccucugccccagauaggu

SEQ ID NO: 162143 - RNA, 25 nt, Artificial Sequence
  Description of Artificial Sequence: Synthetic oligonucleotide
uggugccaguggcuuauuaauuccg

SEQ ID NO: 162144 - RNA, 25 nt, Artificial Sequence
  Description of Artificial Sequence: Synthetic oligonucleotide
gauacuaguuugcuuugcugaccaa

SEQ ID NO: 162145 - RNA, 25 nt, Artificial Sequence
  Description of Artificial Sequence: Synthetic oligonucleotide
aaugccugguaccagaggaugguga

SEQ ID NO: 162146 - RNA, 25 nt, Artificial Sequence
  Description of Artificial Sequence: Synthetic oligonucleotide
aggcgaaggccagguugggggcagu

SEQ ID NO: 162147 - RNA, 25 nt, Artificial Sequence
  Description of Artificial Sequence: Synthetic oligonucleotide
uguuguggcccuggggcccagcccc

SEQ ID NO: 162148 - RNA, 25 nt, Artificial Sequence
  Description of Artificial Sequence: Synthetic oligonucleotide
caaacugggggcucuguauauagcu

SEQ ID NO: 162149 - RNA, 25 nt, Artificial Sequence
  Description of Artificial Sequence: Synthetic oligonucleotide
uaugaagaaaacacaaaguguauaa

SEQ ID NO: 162150 - RNA, 25 nt, Artificial Sequence
  Description of Artificial Sequence: Synthetic oligonucleotide
aaucugaguauauauuuacaugucu

SEQ ID NO: 162151 - RNA, 25 nt, Artificial Sequence
  Description of Artificial Sequence: Synthetic oligonucleotide
uuuuuaaaagggucguuaccagaga

SEQ ID NO: 162152 - RNA, 25 nt, Artificial Sequence
  Description of Artificial Sequence: Synthetic oligonucleotide
auuuacccaucggguaagaugcucc

SEQ ID NO: 162153 - RNA, 25 nt, Artificial Sequence
  Description of Artificial Sequence: Synthetic oligonucleotide
cugguggcugggaggcaucaguugc

SEQ ID NO: 162154 - RNA, 25 nt, Artificial Sequence
  Description of Artificial Sequence: Synthetic oligonucleotide
cuauauauuaaaaacaaaaaagaaa

SEQ ID NO: 162155 - RNA, 25 nt, Artificial Sequence
  Description of Artificial Sequence: Synthetic oligonucleotide
aaaaaaggaaaauguuuuuaaaaag

SEQ ID NO: 162156 - RNA, 25 nt, Artificial Sequence
  Description of Artificial Sequence: Synthetic oligonucleotide
ggucauauauuuuuugcuacuuuug

SEQ ID NO: 162157 - RNA, 25 nt, Artificial Sequence
  Description of Artificial Sequence: Synthetic oligonucleotide
gcuguuuuauuuuuuuaaauuaugu

SEQ ID NO: 162158 - RNA, 25 nt, Artificial Sequence
  Description of Artificial Sequence: Synthetic oligonucleotide
uucuaaaccuauuuucaguuuaggu

SEQ ID NO: 162159 - RNA, 25 nt, Artificial Sequence
  Description of Artificial Sequence: Synthetic oligonucleotide
ucccucaauaaaaauugcugcugcu

SEQ ID NO: 162160 - RNA, 25 nt, Artificial Sequence
  Description of Artificial Sequence: Synthetic oligonucleotide
uucauuuaucuaugggcuguaugaa

SEQ ID NO: 162161 - RNA, 25 nt, Artificial Sequence
  Description of Artificial Sequence: Synthetic oligonucleotide
aaagggugggaauguccacuggaaa

SEQ ID NO: 162162 - RNA, 25 nt, Artificial Sequence
  Description of Artificial Sequence: Synthetic oligonucleotide
agaagggacacccacgggcccuggg

SEQ ID NO: 162163 - RNA, 25 nt, Artificial Sequence
  Description of Artificial Sequence: Synthetic oligonucleotide
ggcuaggucugucccgagggcaccg

SEQ ID NO: 162164 - RNA, 25 nt, Artificial Sequence
  Description of Artificial Sequence: Synthetic oligonucleotide
gcaugcucccggcgcagguuccuug

SEQ ID NO: 162165 - RNA, 25 nt, Artificial Sequence
  Description of Artificial Sequence: Synthetic oligonucleotide
guaaccucuucuuccuagguccugc

SEQ ID NO: 162166 - RNA, 25 nt, Artificial Sequence
  Description of Artificial Sequence: Synthetic oligonucleotide
cacccagaccucacgacgcaccucc

SEQ ID NO: 162167 - RNA, 25 nt, Artificial Sequence
  Description of Artificial Sequence: Synthetic oligonucleotide
cugccucuccgcugcuuuuggaaag

SEQ ID NO: 162168 - RNA, 25 nt, Artificial Sequence
  Description of Artificial Sequence: Synthetic oligonucleotide
gucagaaaaagaagaugucugcuuc

SEQ ID NO: 162169 - RNA, 25 nt, Artificial Sequence
  Description of Artificial Sequence: Synthetic oligonucleotide
cgagggcaggaaccccauccaugca

SEQ ID NO: 162170 - RNA, 25 nt, Artificial Sequence
  Description of Artificial Sequence: Synthetic oligonucleotide
aguagaggcgcugggcagagaguca

SEQ ID NO: 162171 - RNA, 25 nt, Artificial Sequence
  Description of Artificial Sequence: Synthetic oligonucleotide
aaggcccagcagccaucgaccaugg

SEQ ID NO: 162172 - RNA, 25 nt, Artificial Sequence
  Description of Artificial Sequence: Synthetic oligonucleotide
gaugguuuccuccaaggaaaccggu

SEQ ID NO: 162173 - RNA, 25 nt, Artificial Sequence
  Description of Artificial Sequence: Synthetic oligonucleotide
ugggguugggcuggggagggggcac

SEQ ID NO: 162174 - RNA, 25 nt, Artificial Sequence
  Description of Artificial Sequence: Synthetic oligonucleotide
ccuaccuaggaauagccacggggua

SEQ ID NO: 162175 - RNA, 25 nt, Artificial Sequence
  Description of Artificial Sequence: Synthetic oligonucleotide
agagcuacagugauuaagaggaaag

SEQ ID NO: 162176 - RNA, 25 nt, Artificial Sequence
  Description of Artificial Sequence: Synthetic oligonucleotide
gcaagggcgcgguugcucacgccug

SEQ ID NO: 162177 - RNA, 25 nt, Artificial Sequence
  Description of Artificial Sequence: Synthetic oligonucleotide
guaaucccagcacuuugggacaccg

SEQ ID NO: 162178 - RNA, 25 nt, Artificial Sequence
  Description of Artificial Sequence: Synthetic oligonucleotide
gaggugggcagaucacuucagguca

SEQ ID NO: 162179 - RNA, 25 nt, Artificial Sequence
  Description of Artificial Sequence: Synthetic oligonucleotide
aggaguuugagaccagccuggccaa

SEQ ID NO: 162180 - RNA, 25 nt, Artificial Sequence
  Description of Artificial Sequence: Synthetic oligonucleotide
acuuagugaaaccccaucucuacua

SEQ ID NO: 162181 - RNA, 25 nt, Artificial Sequence
  Description of Artificial Sequence: Synthetic oligonucleotide
aaaaaugcaaaaauuauccaggcau

SEQ ID NO: 162182 - RNA, 25 nt, Artificial Sequence
  Description of Artificial Sequence: Synthetic oligonucleotide
ugguggcacacgccuguaaucccag

SEQ ID NO: 162183 - RNA, 25 nt, Artificial Sequence
  Description of Artificial Sequence: Synthetic oligonucleotide
gcuccacaggaggcugaggcagaau

SEQ ID NO: 162184 - RNA, 25 nt, Artificial Sequence
  Description of Artificial Sequence: Synthetic oligonucleotide
ucccuugaagcugggaggcggaggu

SEQ ID NO: 162185 - RNA, 25 nt, Artificial Sequence
  Description of Artificial Sequence: Synthetic oligonucleotide
uugcagugagccgagauugcgccau

SEQ ID NO: 162186 - RNA, 25 nt, Artificial Sequence
  Description of Artificial Sequence: Synthetic oligonucleotide
uugcacuccagccugggcaacagag

SEQ ID NO: 162187 - RNA, 25 nt, Artificial Sequence
  Description of Artificial Sequence: Synthetic oligonucleotide
gaaaacaaaaaggaaaacaaaugau

SEQ ID NO: 162188 - RNA, 25 nt, Artificial Sequence
  Description of Artificial Sequence: Synthetic oligonucleotide
ugaaggucugcagaaacugaaaccc

SEQ ID NO: 162189 - RNA, 25 nt, Artificial Sequence
  Description of Artificial Sequence: Synthetic oligonucleotide
cagacaugugucugcccccucuaug

SEQ ID NO: 162190 - RNA, 25 nt, Artificial Sequence
  Description of Artificial Sequence: Synthetic oligonucleotide
gugggcaugguuuugccagugcuuc

SEQ ID NO: 162191 - RNA, 25 nt, Artificial Sequence
  Description of Artificial Sequence: Synthetic oligonucleotide
cuaagugcaggagaacaugucaccu

SEQ ID NO: 162192 - RNA, 25 nt, Artificial Sequence
  Description of Artificial Sequence: Synthetic oligonucleotide
ugaggcuaguuuugcauucaggucc

SEQ ID NO: 162193 - RNA, 25 nt, Artificial Sequence
  Description of Artificial Sequence: Synthetic oligonucleotide
ccuggcuucguuucuuguugguaug

SEQ ID NO: 162194 - RNA, 25 nt, Artificial Sequence
  Description of Artificial Sequence: Synthetic oligonucleotide
gccuccccagaucguccuuccugua

SEQ ID NO: 162195 - RNA, 25 nt, Artificial Sequence
  Description of Artificial Sequence: Synthetic oligonucleotide
auccaugugaccagacuguauuugu

SEQ ID NO: 162196 - RNA, 25 nt, Artificial Sequence
  Description of Artificial Sequence: Synthetic oligonucleotide
uugggacugucgcagaucuuggcuu

SEQ ID NO: 162197 - RNA, 25 nt, Artificial Sequence
  Description of Artificial Sequence: Synthetic oligonucleotide
ucuuacaguucuuccuguccaaacu

SEQ ID NO: 162198 - RNA, 25 nt, Artificial Sequence
  Description of Artificial Sequence: Synthetic oligonucleotide
uccauccugucccucaggaacgggg

SEQ ID NO: 162199 - RNA, 25 nt, Artificial Sequence
  Description of Artificial Sequence: Synthetic oligonucleotide
gggaaaauucuccgaauguuuuugg

SEQ ID NO: 162200 - RNA, 25 nt, Artificial Sequence
  Description of Artificial Sequence: Synthetic oligonucleotide
guuuuuuggcugcuuggaauuuacu

SEQ ID NO: 162201 - RNA, 25 nt, Artificial Sequence
  Description of Artificial Sequence: Synthetic oligonucleotide
uucugccaccugcuggucaucacug

SEQ ID NO: 162202 - RNA, 25 nt, Artificial Sequence
  Description of Artificial Sequence: Synthetic oligonucleotide
guccucacuaaguggauucuggcuc

SEQ ID NO: 162203 - RNA, 25 nt, Artificial Sequence
  Description of Artificial Sequence: Synthetic oligonucleotide
cccccguaccucauggcucaaacua

SEQ ID NO: 162204 - RNA, 25 nt, Artificial Sequence
  Description of Artificial Sequence: Synthetic oligonucleotide
accacuccucagucgcuauauuaaa

SEQ ID NO: 162205 - RNA, 25 nt, Artificial Sequence
  Description of Artificial Sequence: Synthetic oligonucleotide
agcuuauauuuugcuggauuacugc

SEQ ID NO: 162206 - RNA, 25 nt, Artificial Sequence
  Description of Artificial Sequence: Synthetic oligonucleotide
cuaaauacaaaagaaaguucaauau

SEQ ID NO: 162207 - RNA, 25 nt, Artificial Sequence
  Description of Artificial Sequence: Synthetic oligonucleotide
uguuuucauuucuguagggaaaaug

SEQ ID NO: 162208 - RNA, 25 nt, Artificial Sequence
  Description of Artificial Sequence: Synthetic oligonucleotide
gggauugcugcuuuaaauuucugag

SEQ ID NO: 162209 - RNA, 25 nt, Artificial Sequence
  Description of Artificial Sequence: Synthetic oligonucleotide
gcuagggauuuuuuggcagcugcag

SEQ ID NO: 162210 - RNA, 25 nt, Artificial Sequence
  Description of Artificial Sequence: Synthetic oligonucleotide
guguuggcgacuauuguaaaauucu

SEQ ID NO: 162211 - RNA, 25 nt, Artificial Sequence
  Description of Artificial Sequence: Synthetic oligonucleotide
ucuuuguuucucucuguaaauagca

SEQ ID NO: 162212 - RNA, 25 nt, Artificial Sequence
  Description of Artificial Sequence: Synthetic oligonucleotide
accugcuaacauuacaauuuguauu

SEQ ID NO: 162213 - RNA, 25 nt, Artificial Sequence
  Description of Artificial Sequence: Synthetic oligonucleotide
uuauguuuaaagaaggcaucauuug

SEQ ID NO: 162214 - RNA, 25 nt, Artificial Sequence
  Description of Artificial Sequence: Synthetic oligonucleotide
ggugaacagaacuaggaaaugaauu

SEQ ID NO: 162215 - RNA, 25 nt, Artificial Sequence
  Description of Artificial Sequence: Synthetic oligonucleotide
uuuuagcucuuaaaagcauuugcuu

SEQ ID NO: 162216 - RNA, 25 nt, Artificial Sequence
  Description of Artificial Sequence: Synthetic oligonucleotide
uugagaccgcacaggagugucuuuc

SEQ ID NO: 162217 - RNA, 25 nt, Artificial Sequence
  Description of Artificial Sequence: Synthetic oligonucleotide
ccuuguaaaacagugaugauaauuu

SEQ ID NO: 162218 - RNA, 25 nt, Artificial Sequence
  Description of Artificial Sequence: Synthetic oligonucleotide
ucugccuuggcccuaccuugaagca

SEQ ID NO: 162219 - RNA, 25 nt, Artificial Sequence
  Description of Artificial Sequence: Synthetic oligonucleotide
aauguugugugaagggaugaagaau

SEQ ID NO: 162220 - RNA, 25 nt, Artificial Sequence
  Description of Artificial Sequence: Synthetic oligonucleotide
ucuaaaagucuucauaaguccuugg

SEQ ID NO: 162221 - RNA, 25 nt, Artificial Sequence
  Description of Artificial Sequence: Synthetic oligonucleotide
ggagaggugcuagaaaaauauaagg

SEQ ID NO: 162222 - RNA, 25 nt, Artificial Sequence
  Description of Artificial Sequence: Synthetic oligonucleotide
gcacuaucauaauuacagugauguc

SEQ ID NO: 162223 - RNA, 25 nt, Artificial Sequence
  Description of Artificial Sequence: Synthetic oligonucleotide
ccuugcuguuacuacucaaaucacc

SEQ ID NO: 162224 - RNA, 25 nt, Artificial Sequence
  Description of Artificial Sequence: Synthetic oligonucleotide
ccacaaauuuccccaaagacugcgc

SEQ ID NO: 162225 - RNA, 25 nt, Artificial Sequence
  Description of Artificial Sequence: Synthetic oligonucleotide
cuagcugucaaauaaaagacaguga

SEQ ID NO: 162226 - RNA, 25 nt, Artificial Sequence
  Description of Artificial Sequence: Synthetic oligonucleotide
gcccagcccuggggagccccugugg

SEQ ID NO: 162227 - RNA, 25 nt, Artificial Sequence
  Description of Artificial Sequence: Synthetic oligonucleotide
gaaguggaguccuuccugguccacc

SEQ ID NO: 162228 - RNA, 25 nt, Artificial Sequence
  Description of Artificial Sequence: Synthetic oligonucleotide
cccggugaccugcugcagcuucgcu

SEQ ID NO: 162229 - RNA, 25 nt, Artificial Sequence
  Description of Artificial Sequence: Synthetic oligonucleotide
ugucggcugcgggacgaugugcaga

SEQ ID NO: 162230 - RNA, 25 nt, Artificial Sequence
  Description of Artificial Sequence: Synthetic oligonucleotide
agcaucaacuggcugcgggacgggg

SEQ ID NO: 162231 - RNA, 25 nt, Artificial Sequence
  Description of Artificial Sequence: Synthetic oligonucleotide
gugcagcuggcggaaagcaaccgca

SEQ ID NO: 162232 - RNA, 25 nt, Artificial Sequence
  Description of Artificial Sequence: Synthetic oligonucleotide
acccgcaucacaggggaggaggugg

SEQ ID NO: 162233 - RNA, 25 nt, Artificial Sequence
  Description of Artificial Sequence: Synthetic oligonucleotide
gaggugcaggacuccgugcccgcag

SEQ ID NO: 162234 - RNA, 25 nt, Artificial Sequence
  Description of Artificial Sequence: Synthetic oligonucleotide
gacuccggccucuaugcuugcguaa

SEQ ID NO: 162235 - RNA, 25 nt, Artificial Sequence
  Description of Artificial Sequence: Synthetic oligonucleotide
accagcagccccucgggcagugaca

SEQ ID NO: 162236 - RNA, 25 nt, Artificial Sequence
  Description of Artificial Sequence: Synthetic oligonucleotide
accaccuacuucuccgucaauguuu

SEQ ID NO: 162237 - RNA, 25 nt, Artificial Sequence
  Description of Artificial Sequence: Synthetic oligonucleotide
ucagaugcucuccccuccucggagg

SEQ ID NO: 162238 - RNA, 25 nt, Artificial Sequence
  Description of Artificial Sequence: Synthetic oligonucleotide
gaugaugaugaugaugaugacuccu

SEQ ID NO: 162239 - RNA, 25 nt, Artificial Sequence
  Description of Artificial Sequence: Synthetic oligonucleotide
ucuucagaggagaaagaaacagaua

SEQ ID NO: 162240 - RNA, 25 nt, Artificial Sequence
  Description of Artificial Sequence: Synthetic oligonucleotide
aacaccaaaccaaaccccguagcuc

SEQ ID NO: 162241 - RNA, 25 nt, Artificial Sequence
  Description of Artificial Sequence: Synthetic oligonucleotide
ccauauuggacauccccagaaaaga

SEQ ID NO: 162242 - RNA, 25 nt, Artificial Sequence
  Description of Artificial Sequence: Synthetic oligonucleotide
auggaaaagaaauugcaugcagugc

SEQ ID NO: 162243 - RNA, 25 nt, Artificial Sequence
  Description of Artificial Sequence: Synthetic oligonucleotide
ccggcugccaagacagugaaguuca

SEQ ID NO: 162244 - RNA, 25 nt, Artificial Sequence
  Description of Artificial Sequence: Synthetic oligonucleotide
aaaugcccuuccagugggaccccaa

SEQ ID NO: 162245 - RNA, 25 nt, Artificial Sequence
  Description of Artificial Sequence: Synthetic oligonucleotide
aaccccacacugcgcugguugaaaa

SEQ ID NO: 162246 - RNA, 25 nt, Artificial Sequence
  Description of Artificial Sequence: Synthetic oligonucleotide
aauggcaaagaauucaaaccugacc

SEQ ID NO: 162247 - RNA, 25 nt, Artificial Sequence
  Description of Artificial Sequence: Synthetic oligonucleotide
cacagaauuggaggcuacaaggucc

SEQ ID NO: 162248 - RNA, 25 nt, Artificial Sequence
  Description of Artificial Sequence: Synthetic oligonucleotide
cguuaugccaccuggagcaucauaa

SEQ ID NO: 162249 - RNA, 25 nt, Artificial Sequence
  Description of Artificial Sequence: Synthetic oligonucleotide
auggacucuguggugcccucugaca

SEQ ID NO: 162250 - RNA, 25 nt, Artificial Sequence
  Description of Artificial Sequence: Synthetic oligonucleotide
aagggcaacuacaccugcauugugg

SEQ ID NO: 162251 - RNA, 25 nt, Artificial Sequence
  Description of Artificial Sequence: Synthetic oligonucleotide
gagaaugaguacggcagcaucaacc

SEQ ID NO: 162252 - RNA, 25 nt, Artificial Sequence
  Description of Artificial Sequence: Synthetic oligonucleotide
cacacauaccagcuggaugucgugg

SEQ ID NO: 162253 - RNA, 25 nt, Artificial Sequence
  Description of Artificial Sequence: Synthetic oligonucleotide
gagcgguccccucaccggcccaucc

SEQ ID NO: 162254 - RNA, 25 nt, Artificial Sequence
  Description of Artificial Sequence: Synthetic oligonucleotide
cugcaagcaggguugcccgccaaca

SEQ ID NO: 162255 - RNA, 25 nt, Artificial Sequence
  Description of Artificial Sequence: Synthetic oligonucleotide
aaaacaguggcccuggguagcaacg

SEQ ID NO: 162256 - RNA, 25 nt, Artificial Sequence
  Description of Artificial Sequence: Synthetic oligonucleotide
guggaguucauguguaagguguaca

SEQ ID NO: 162257 - RNA, 25 nt, Artificial Sequence
  Description of Artificial Sequence: Synthetic oligonucleotide
agugacccgcagccgcacauccagu

SEQ ID NO: 162258 - RNA, 25 nt, Artificial Sequence
  Description of Artificial Sequence: Synthetic oligonucleotide
uggcuaaagcacaucgaggugaaug

SEQ ID NO: 162259 - RNA, 25 nt, Artificial Sequence
  Description of Artificial Sequence: Synthetic oligonucleotide
gggagcaagauuggcccagacaacc

SEQ ID NO: 162260 - RNA, 25 nt, Artificial Sequence
  Description of Artificial Sequence: Synthetic oligonucleotide
cugccuuauguccagaucuugaaga

SEQ ID NO: 162261 - RNA, 25 nt, Artificial Sequence
  Description of Artificial Sequence: Synthetic oligonucleotide
acugcuggaguuaauaccaccgaca

SEQ ID NO: 162262 - RNA, 25 nt, Artificial Sequence
  Description of Artificial Sequence: Synthetic oligonucleotide
aaagagauggaggugcuucacuuaa

SEQ ID NO: 162263 - RNA, 25 nt, Artificial Sequence
  Description of Artificial Sequence: Synthetic oligonucleotide
agaaaugucuccuuugaggacgcag

SEQ ID NO: 162264 - RNA, 25 nt, Artificial Sequence
  Description of Artificial Sequence: Synthetic oligonucleotide
ggggaguauacgugcuuggcgggua

SEQ ID NO: 162265 - RNA, 25 nt, Artificial Sequence
  Description of Artificial Sequence: Synthetic oligonucleotide
aacucuaucggacucucccaucacu

SEQ ID NO: 162266 - RNA, 25 nt, Artificial Sequence
  Description of Artificial Sequence: Synthetic oligonucleotide
ucugcaugguugaccguucuggaag

SEQ ID NO: 162267 - RNA, 25 nt, Artificial Sequence
  Description of Artificial Sequence: Synthetic oligonucleotide
gcccuggaagagaggccggcaguga

SEQ ID NO: 162268 - RNA, 25 nt, Artificial Sequence
  Description of Artificial Sequence: Synthetic oligonucleotide
augaccucgccccuguaccuggaga

SEQ ID NO: 162269 - RNA, 25 nt, Artificial Sequence
  Description of Artificial Sequence: Synthetic oligonucleotide
aucaucaucuauugcacaggggccu

SEQ ID NO: 162270 - RNA, 25 nt, Artificial Sequence
  Description of Artificial Sequence: Synthetic oligonucleotide
uuccucaucuccugcaugguggggu

SEQ ID NO: 162271 - RNA, 25 nt, Artificial Sequence
  Description of Artificial Sequence: Synthetic oligonucleotide
ucggucaucgucuacaagaugaaga

SEQ ID NO: 162272 - RNA, 25 nt, Artificial Sequence
  Description of Artificial Sequence: Synthetic oligonucleotide
agugguaccaagaagagugacuucc

SEQ ID NO: 162273 - RNA, 25 nt, Artificial Sequence
  Description of Artificial Sequence: Synthetic oligonucleotide
cacagccagauggcugugcacaagc

SEQ ID NO: 162274 - RNA, 25 nt, Artificial Sequence
  Description of Artificial Sequence: Synthetic oligonucleotide
cuggccaagagcaucccucugcgca

SEQ ID NO: 162275 - RNA, 25 nt, Artificial Sequence
  Description of Artificial Sequence: Synthetic oligonucleotide
agacagguaacagugucugcugacu

SEQ ID NO: 162276 - RNA, 25 nt, Artificial Sequence
  Description of Artificial Sequence: Synthetic oligonucleotide
uccagugcauccaugaacucugggg

SEQ ID NO: 162277 - RNA, 25 nt, Artificial Sequence
  Description of Artificial Sequence: Synthetic oligonucleotide
guucuucugguucggccaucacggc

SEQ ID NO: 162278 - RNA, 25 nt, Artificial Sequence
  Description of Artificial Sequence: Synthetic oligonucleotide
cucuccuccagugggacucccaugc

SEQ ID NO: 162279 - RNA, 25 nt, Artificial Sequence
  Description of Artificial Sequence: Synthetic oligonucleotide
cuagcaggggucucugaguaugagc

SEQ ID NO: 162280 - RNA, 25 nt, Artificial Sequence
  Description of Artificial Sequence: Synthetic oligonucleotide
cuucccgaagacccucgcugggagc

SEQ ID NO: 162281 - RNA, 25 nt, Artificial Sequence
  Description of Artificial Sequence: Synthetic oligonucleotide
cugccucgggacagacuggucuuag

SEQ ID NO: 162282 - RNA, 25 nt, Artificial Sequence
  Description of Artificial Sequence: Synthetic oligonucleotide
ggcaaaccccugggagagggcugcu

SEQ ID NO: 162283 - RNA, 25 nt, Artificial Sequence
  Description of Artificial Sequence: Synthetic oligonucleotide
uuugggcaggugguguuggcagagg

SEQ ID NO: 162284 - RNA, 25 nt, Artificial Sequence
  Description of Artificial Sequence: Synthetic oligonucleotide
gcuaucgggcuggacaaggacaaac

SEQ ID NO: 162285 - RNA, 25 nt, Artificial Sequence
  Description of Artificial Sequence: Synthetic oligonucleotide
cccaaccgugugaccaaaguggcug

SEQ ID NO: 162286 - RNA, 25 nt, Artificial Sequence
  Description of Artificial Sequence: Synthetic oligonucleotide
gugaagauguugaagucggacgcaa

SEQ ID NO: 162287 - RNA, 25 nt, Artificial Sequence
  Description of Artificial Sequence: Synthetic oligonucleotide
acagagaaagacuugucagaccuga

SEQ ID NO: 162288 - RNA, 25 nt, Artificial Sequence
  Description of Artificial Sequence: Synthetic oligonucleotide
aucucagaaauggagaugaugaaga

SEQ ID NO: 162289 - RNA, 25 nt, Artificial Sequence
  Description of Artificial Sequence: Synthetic oligonucleotide
augaucgggaagcauaagaauauca

SEQ ID NO: 162290 - RNA, 25 nt, Artificial Sequence
  Description of Artificial Sequence: Synthetic oligonucleotide
aucaaccugcugggggccugcacgc

SEQ ID NO: 162291 - RNA, 25 nt, Artificial Sequence
  Description of Artificial Sequence: Synthetic oligonucleotide
caggauggucccuuguaugucaucg

SEQ ID NO: 162292 - RNA, 25 nt, Artificial Sequence
  Description of Artificial Sequence: Synthetic oligonucleotide
guggaguaugccuccaagggcaacc

SEQ ID NO: 162293 - RNA, 25 nt, Artificial Sequence
  Description of Artificial Sequence: Synthetic oligonucleotide
cugcgggaguaccugcaggcccgga

SEQ ID NO: 162294 - RNA, 25 nt, Artificial Sequence
  Description of Artificial Sequence: Synthetic oligonucleotide
aggcccccagggcuggaauacugcu

SEQ ID NO: 162295 - RNA, 25 nt, Artificial Sequence
  Description of Artificial Sequence: Synthetic oligonucleotide
uacaaccccagccacaacccagagg

SEQ ID NO: 162296 - RNA, 25 nt, Artificial Sequence
  Description of Artificial Sequence: Synthetic oligonucleotide
gagcagcucuccuccaaggaccugg

SEQ ID NO: 162297 - RNA, 25 nt, Artificial Sequence
  Description of Artificial Sequence: Synthetic oligonucleotide
guguccugcgccuaccagguggccc

SEQ ID NO: 162298 - RNA, 25 nt, Artificial Sequence
  Description of Artificial Sequence: Synthetic oligonucleotide
cgaggcauggaguaucuggccucca

SEQ ID NO: 162299 - RNA, 25 nt, Artificial Sequence
  Description of Artificial Sequence: Synthetic oligonucleotide
aagaagugcauacaccgagaccugg

SEQ ID NO: 162300 - RNA, 25 nt, Artificial Sequence
  Description of Artificial Sequence: Synthetic oligonucleotide
gcagccaggaauguccuggugacag

SEQ ID NO: 162301 - RNA, 25 nt, Artificial Sequence
  Description of Artificial Sequence: Synthetic oligonucleotide
gaggacaaugugaugaagauagcag

SEQ ID NO: 162302 - RNA, 25 nt, Artificial Sequence
  Description of Artificial Sequence: Synthetic oligonucleotide
gacuuuggccucgcacgggacauuc

SEQ ID NO: 162303 - RNA, 25 nt, Artificial Sequence
  Description of Artificial Sequence: Synthetic oligonucleotide
caccacaucgacuacuauaaaaaga

SEQ ID NO: 162304 - RNA, 25 nt, Artificial Sequence
  Description of Artificial Sequence: Synthetic oligonucleotide
acaaccaacggccgacugccuguga

SEQ ID NO: 162305 - RNA, 25 nt, Artificial Sequence
  Description of Artificial Sequence: Synthetic oligonucleotide
aaguggauggcacccgaggcauuau

SEQ ID NO: 162306 - RNA, 25 nt, Artificial Sequence
  Description of Artificial Sequence: Synthetic oligonucleotide
uuugaccggaucuacacccaccaga

SEQ ID NO: 162307 - RNA, 25 nt, Artificial Sequence
  Description of Artificial Sequence: Synthetic oligonucleotide
agugauguguggucuuucggggugc

SEQ ID NO: 162308 - RNA, 25 nt, Artificial Sequence
  Description of Artificial Sequence: Synthetic oligonucleotide
cuccugugggagaucuucacucugg

SEQ ID NO: 162309 - RNA, 25 nt, Artificial Sequence
  Description of Artificial Sequence: Synthetic oligonucleotide
ggcggcuccccauaccccggugugc

SEQ ID NO: 162310 - RNA, 25 nt, Artificial Sequence
  Description of Artificial Sequence: Synthetic oligonucleotide
ccuguggaggaacuuuucaagcugc

SEQ ID NO: 162311 - RNA, 25 nt, Artificial Sequence
  Description of Artificial Sequence: Synthetic oligonucleotide
cugaaggagggucaccgcauggaca

SEQ ID NO: 162312 - RNA, 25 nt, Artificial Sequence
  Description of Artificial Sequence: Synthetic oligonucleotide
aagcccaguaacugcaccaacgagc

SEQ ID NO: 162313 - RNA, 25 nt, Artificial Sequence
  Description of Artificial Sequence: Synthetic oligonucleotide
cuguacaugaugaugcgggacugcu

SEQ ID NO: 162314 - RNA, 25 nt, Artificial Sequence
  Description of Artificial Sequence: Synthetic oligonucleotide
uggcaugcagugcccucacagagac

SEQ ID NO: 162315 - RNA, 25 nt, Artificial Sequence
  Description of Artificial Sequence: Synthetic oligonucleotide
cccaccuucaagcagcugguggaag

SEQ ID NO: 162316 - RNA, 25 nt, Artificial Sequence
  Description of Artificial Sequence: Synthetic oligonucleotide
gaccuggaccgcaucguggccuuga

SEQ ID NO: 162317 - RNA, 25 nt, Artificial Sequence
  Description of Artificial Sequence: Synthetic oligonucleotide
accuccaaccaggaguaccuggacc

SEQ ID NO: 162318 - RNA, 25 nt, Artificial Sequence
  Description of Artificial Sequence: Synthetic oligonucleotide
cuguccaugccccuggaccaguacu

SEQ ID NO: 162319 - RNA, 25 nt, Artificial Sequence
  Description of Artificial Sequence: Synthetic oligonucleotide
ucccccagcuuucccgacacccgga

SEQ ID NO: 162320 - RNA, 25 nt, Artificial Sequence
  Description of Artificial Sequence: Synthetic oligonucleotide
agcucuacgugcuccucaggggagg

SEQ ID NO: 162321 - RNA, 25 nt, Artificial Sequence
  Description of Artificial Sequence: Synthetic oligonucleotide
gauuccgucuucucucaugagccgc

SEQ ID NO: 162322 - RNA, 25 nt, Artificial Sequence
  Description of Artificial Sequence: Synthetic oligonucleotide
cugcccgaggagcccugccugcccc

SEQ ID NO: 162323 - RNA, 25 nt, Artificial Sequence
  Description of Artificial Sequence: Synthetic oligonucleotide
cgacacccagcccagcuugccaaug

SEQ ID NO: 162324 - RNA, 25 nt, Artificial Sequence
  Description of Artificial Sequence: Synthetic oligonucleotide
ggcggacucaaacgccgcugacugc

SEQ ID NO: 162325 - RNA, 25 nt, Artificial Sequence
  Description of Artificial Sequence: Synthetic oligonucleotide
ccacccacacgcccuccccagacuc

SEQ ID NO: 162326 - RNA, 25 nt, Artificial Sequence
  Description of Artificial Sequence: Synthetic oligonucleotide
ccaccgucagcuguaacccucaccc

SEQ ID NO: 162327 - RNA, 25 nt, Artificial Sequence
  Description of Artificial Sequence: Synthetic oligonucleotide
cacagccccugcugggcccaccacc

SEQ ID NO: 162328 - RNA, 25 nt, Artificial Sequence
  Description of Artificial Sequence: Synthetic oligonucleotide
cuguccgucccuguccccuuuccug

SEQ ID NO: 162329 - RNA, 25 nt, Artificial Sequence
  Description of Artificial Sequence: Synthetic oligonucleotide
gcuggcaggagccggcugccuacca

SEQ ID NO: 162330 - RNA, 25 nt, Artificial Sequence
  Description of Artificial Sequence: Synthetic oligonucleotide
aggggccuuccuguguggccugccu

SEQ ID NO: 162331 - RNA, 25 nt, Artificial Sequence
  Description of Artificial Sequence: Synthetic oligonucleotide
uucaccccacucagcucaccucucc

SEQ ID NO: 162332 - RNA, 25 nt, Artificial Sequence
  Description of Artificial Sequence: Synthetic oligonucleotide
ccuccaccuccucuccaccugcugg

SEQ ID NO: 162333 - RNA, 25 nt, Artificial Sequence
  Description of Artificial Sequence: Synthetic oligonucleotide
gugagaggugcaaagaggcagaucu

SEQ ID NO: 162334 - RNA, 25 nt, Artificial Sequence
  Description of Artificial Sequence: Synthetic oligonucleotide
uuugcugccagccacuucauccccu

SEQ ID NO: 162335 - RNA, 25 nt, Artificial Sequence
  Description of Artificial Sequence: Synthetic oligonucleotide
ucccagauguuggaccaacaccccu

SEQ ID NO: 162336 - RNA, 25 nt, Artificial Sequence
  Description of Artificial Sequence: Synthetic oligonucleotide
ucccugccaccaggcacugccugga

SEQ ID NO: 162337 - RNA, 25 nt, Artificial Sequence
  Description of Artificial Sequence: Synthetic oligonucleotide
agggcagggagugggagccaaugaa

SEQ ID NO: 162338 - RNA, 25 nt, Artificial Sequence
  Description of Artificial Sequence: Synthetic oligonucleotide
acaggcaugcaagugagagcuuccu

SEQ ID NO: 162339 - RNA, 25 nt, Artificial Sequence
  Description of Artificial Sequence: Synthetic oligonucleotide
ugagcuuucuccugucgguuugguc

SEQ ID NO: 162340 - RNA, 25 nt, Artificial Sequence
  Description of Artificial Sequence: Synthetic oligonucleotide
cuguuuugccuucacccauaagccc

SEQ ID NO: 162341 - RNA, 25 nt, Artificial Sequence
  Description of Artificial Sequence: Synthetic oligonucleotide
ccucgcacucugguggcaggugccu

SEQ ID NO: 162342 - RNA, 25 nt, Artificial Sequence
  Description of Artificial Sequence: Synthetic oligonucleotide
uuguccucagggcuacagcaguagg

SEQ ID NO: 162343 - RNA, 25 nt, Artificial Sequence
  Description of Artificial Sequence: Synthetic oligonucleotide
ggaggucagugcuucgugccucgau

SEQ ID NO: 162344 - RNA, 25 nt, Artificial Sequence
  Description of Artificial Sequence: Synthetic oligonucleotide
uugaaggugaccucugccccagaua

SEQ ID NO: 162345 - RNA, 25 nt, Artificial Sequence
  Description of Artificial Sequence: Synthetic oligonucleotide
agguggugccaguggcuuauuaauu

SEQ ID NO: 162346 - RNA, 25 nt, Artificial Sequence
  Description of Artificial Sequence: Synthetic oligonucleotide
uccgauacuaguuugcuuugcugac

SEQ ID NO: 162347 - RNA, 25 nt, Artificial Sequence
  Description of Artificial Sequence: Synthetic oligonucleotide
ccaaaugccugguaccagaggaugg

SEQ ID NO: 162348 - RNA, 25 nt, Artificial Sequence
  Description of Artificial Sequence: Synthetic oligonucleotide
gugaggcgaaggccagguugggggc

SEQ ID NO: 162349 - RNA, 25 nt, Artificial Sequence
  Description of Artificial Sequence: Synthetic oligonucleotide
caguguuguggcccuggggcccagc

SEQ ID NO: 162350 - RNA, 25 nt, Artificial Sequence
  Description of Artificial Sequence: Synthetic oligonucleotide
ccccaaacugggggcucuguauaua

SEQ ID NO: 162351 - RNA, 25 nt, Artificial Sequence
  Description of Artificial Sequence: Synthetic oligonucleotide
agcuaugaagaaaacacaaagugua

SEQ ID NO: 162352 - RNA, 25 nt, Artificial Sequence
  Description of Artificial Sequence: Synthetic oligonucleotide
auaaaucugaguauauauuuacaug

SEQ ID NO: 162353 - RNA, 25 nt, Artificial Sequence
  Description of Artificial Sequence: Synthetic oligonucleotide
gucuuuuuaaaagggucguuaccag

SEQ ID NO: 162354 - RNA, 25 nt, Artificial Sequence
  Description of Artificial Sequence: Synthetic oligonucleotide
gagauuuacccaucggguaagaugc

SEQ ID NO: 162355 - RNA, 25 nt, Artificial Sequence
  Description of Artificial Sequence: Synthetic oligonucleotide
cuccugguggcugggaggcaucagu

SEQ ID NO: 162356 - RNA, 25 nt, Artificial Sequence
  Description of Artificial Sequence: Synthetic oligonucleotide
uugcuauauauuaaaaacaaaaaag

SEQ ID NO: 162357 - RNA, 25 nt, Artificial Sequence
  Description of Artificial Sequence: Synthetic oligonucleotide
gaaaaaaaaggaaaauguuuuuaaa

SEQ ID NO: 162358 - RNA, 25 nt, Artificial Sequence
  Description of Artificial Sequence: Synthetic oligonucleotide
aaaggucauauauuuuuugcuacuu

SEQ ID NO: 162359 - RNA, 25 nt, Artificial Sequence
  Description of Artificial Sequence: Synthetic oligonucleotide
uuugcuguuuuauuuuuuuaaauua

SEQ ID NO: 162360 - RNA, 25 nt, Artificial Sequence
  Description of Artificial Sequence: Synthetic oligonucleotide
auguucuaaaccuauuuucaguuua

SEQ ID NO: 162361 - RNA, 25 nt, Artificial Sequence
  Description of Artificial Sequence: Synthetic oligonucleotide
aggucccucaauaaaaauugcugcu

SEQ ID NO: 162362 - RNA, 25 nt, Artificial Sequence
  Description of Artificial Sequence: Synthetic oligonucleotide
ugcuucauuuaucuaugggcuguau

SEQ ID NO: 162363 - RNA, 25 nt, Artificial Sequence
  Description of Artificial Sequence: Synthetic oligonucleotide
ugaaaagggugggaauguccacugg

SEQ ID NO: 162364 - RNA, 25 nt, Artificial Sequence
  Description of Artificial Sequence: Synthetic oligonucleotide
gaaagaagggacacccacgggcccu

SEQ ID NO: 162365 - RNA, 25 nt, Artificial Sequence
  Description of Artificial Sequence: Synthetic oligonucleotide
uggggcuaggucugucccgagggca

SEQ ID NO: 162366 - RNA, 25 nt, Artificial Sequence
  Description of Artificial Sequence: Synthetic oligonucleotide
accgcaugcucccggcgcagguucc

SEQ ID NO: 162367 - RNA, 25 nt, Artificial Sequence
  Description of Artificial Sequence: Synthetic oligonucleotide
cuuguaaccucuucuuccuaggucc

SEQ ID NO: 162368 - RNA, 25 nt, Artificial Sequence
  Description of Artificial Sequence: Synthetic oligonucleotide
cugcacccagaccucacgacgcacc

SEQ ID NO: 162369 - RNA, 25 nt, Artificial Sequence
  Description of Artificial Sequence: Synthetic oligonucleotide
cuccugccucuccgcugcuuuugga

SEQ ID NO: 162370 - RNA, 25 nt, Artificial Sequence
  Description of Artificial Sequence: Synthetic oligonucleotide
aaagucagaaaaagaagaugucugc

SEQ ID NO: 162371 - RNA, 25 nt, Artificial Sequence
  Description of Artificial Sequence: Synthetic oligonucleotide
cuucgagggcaggaaccccauccau

SEQ ID NO: 162372 - RNA, 25 nt, Artificial Sequence
  Description of Artificial Sequence: Synthetic oligonucleotide
ugcaguagaggcgcugggcagagag

SEQ ID NO: 162373 - RNA, 25 nt, Artificial Sequence
  Description of Artificial Sequence: Synthetic oligonucleotide
gucaaggcccagcagccaucgacca

SEQ ID NO: 162374 - RNA, 25 nt, Artificial Sequence
  Description of Artificial Sequence: Synthetic oligonucleotide
auggaugguuuccuccaaggaaacc

SEQ ID NO: 162375 - RNA, 25 nt, Artificial Sequence
  Description of Artificial Sequence: Synthetic oligonucleotide
cggugggguugggcuggggaggggg

SEQ ID NO: 162376 - RNA, 25 nt, Artificial Sequence
  Description of Artificial Sequence: Synthetic oligonucleotide
gcaccuaccuaggaauagccacggg

SEQ ID NO: 162377 - RNA, 25 nt, Artificial Sequence
  Description of Artificial Sequence: Synthetic oligonucleotide
gguagagcuacagugauuaagagga

SEQ ID NO: 162378 - RNA, 25 nt, Artificial Sequence
  Description of Artificial Sequence: Synthetic oligonucleotide
aaagcaagggcgcgguugcucacgc

SEQ ID NO: 162379 - RNA, 25 nt, Artificial Sequence
  Description of Artificial Sequence: Synthetic oligonucleotide
ccuguaaucccagcacuuugggaca

SEQ ID NO: 162380 - RNA, 25 nt, Artificial Sequence
  Description of Artificial Sequence: Synthetic oligonucleotide
accgaggugggcagaucacuucagg

SEQ ID NO: 162381 - RNA, 25 nt, Artificial Sequence
  Description of Artificial Sequence: Synthetic oligonucleotide
gucaggaguuugagaccagccuggc

SEQ ID NO: 162382 - RNA, 25 nt, Artificial Sequence
  Description of Artificial Sequence: Synthetic oligonucleotide
ccaacuuagugaaaccccaucucua

SEQ ID NO: 162383 - RNA, 25 nt, Artificial Sequence
  Description of Artificial Sequence: Synthetic oligonucleotide
acuaaaaaugcaaaaauuauccagg

SEQ ID NO: 162384 - RNA, 25 nt, Artificial Sequence
  Description of Artificial Sequence: Synthetic oligonucleotide
gcaugguggcacacgccuguaaucc

SEQ ID NO: 162385 - RNA, 25 nt, Artificial Sequence
  Description of Artificial Sequence: Synthetic oligonucleotide
ccagcuccacaggaggcugaggcag

SEQ ID NO: 162386 - RNA, 25 nt, Artificial Sequence
  Description of Artificial Sequence: Synthetic oligonucleotide
gaaucccuugaagcugggaggcgga

SEQ ID NO: 162387 - RNA, 25 nt, Artificial Sequence
  Description of Artificial Sequence: Synthetic oligonucleotide
agguugcagugagccgagauugcgc

SEQ ID NO: 162388 - RNA, 25 nt, Artificial Sequence
  Description of Artificial Sequence: Synthetic oligonucleotide
ccauugcacuccagccugggcaaca

SEQ ID NO: 162389 - RNA, 25 nt, Artificial Sequence
  Description of Artificial Sequence: Synthetic oligonucleotide
agagaaaacaaaaaggaaaacaaau

SEQ ID NO: 162390 - RNA, 25 nt, Artificial Sequence
  Description of Artificial Sequence: Synthetic oligonucleotide
ugaugaaggucugcagaaacugaaa

SEQ ID NO: 162391 - RNA, 25 nt, Artificial Sequence
  Description of Artificial Sequence: Synthetic oligonucleotide
acccagacaugugucugcccccucu

SEQ ID NO: 162392 - RNA, 25 nt, Artificial Sequence
  Description of Artificial Sequence: Synthetic oligonucleotide
uaugugggcaugguuuugccagugc

SEQ ID NO: 162393 - RNA, 25 nt, Artificial Sequence
  Description of Artificial Sequence: Synthetic oligonucleotide
cuucuaagugcaggagaacauguca

SEQ ID NO: 162394 - RNA, 25 nt, Artificial Sequence
  Description of Artificial Sequence: Synthetic oligonucleotide
accugaggcuaguuuugcauucagg

SEQ ID NO: 162395 - RNA, 25 nt, Artificial Sequence
  Description of Artificial Sequence: Synthetic oligonucleotide
gucccuggcuucguuucuuguuggu

SEQ ID NO: 162396 - RNA, 25 nt, Artificial Sequence
  Description of Artificial Sequence: Synthetic oligonucleotide
uaugccuccccagaucguccuuccu

SEQ ID NO: 162397 - RNA, 25 nt, Artificial Sequence
  Description of Artificial Sequence: Synthetic oligonucleotide
uguauccaugugaccagacuguauu

SEQ ID NO: 162398 - RNA, 25 nt, Artificial Sequence
  Description of Artificial Sequence: Synthetic oligonucleotide
uuguugggacugucgcagaucuugg

SEQ ID NO: 162399 - RNA, 25 nt, Artificial Sequence
  Description of Artificial Sequence: Synthetic oligonucleotide
gcuucuuacaguucuuccuguccaa

SEQ ID NO: 162400 - RNA, 25 nt, Artificial Sequence
  Description of Artificial Sequence: Synthetic oligonucleotide
aacuccauccugucccucaggaacg

SEQ ID NO: 162401 - RNA, 25 nt, Artificial Sequence
  Description of Artificial Sequence: Synthetic oligonucleotide
ggggggaaaauucuccgaauguuuu

SEQ ID NO: 162402 - RNA, 25 nt, Artificial Sequence
  Description of Artificial Sequence: Synthetic oligonucleotide
uugguuuuuuggcugcuuggaauuu

SEQ ID NO: 162403 - RNA, 25 nt, Artificial Sequence
  Description of Artificial Sequence: Synthetic oligonucleotide
uacuucugccaccugcuggucauca

SEQ ID NO: 162404 - RNA, 25 nt, Artificial Sequence
  Description of Artificial Sequence: Synthetic oligonucleotide
acuguccucacuaaguggauucugg

SEQ ID NO: 162405 - RNA, 25 nt, Artificial Sequence
  Description of Artificial Sequence: Synthetic oligonucleotide
gcucccccguaccucauggcucaaa

SEQ ID NO: 162406 - RNA, 25 nt, Artificial Sequence
  Description of Artificial Sequence: Synthetic oligonucleotide
acuaccacuccucagucgcuauauu

SEQ ID NO: 162407 - RNA, 25 nt, Artificial Sequence
  Description of Artificial Sequence: Synthetic oligonucleotide
uaaagcuuauauuuugcuggauuac

SEQ ID NO: 162408 - RNA, 25 nt, Artificial Sequence
  Description of Artificial Sequence: Synthetic oligonucleotide
cugcuaaauacaaaagaaaguucaa

SEQ ID NO: 162409 - RNA, 25 nt, Artificial Sequence
  Description of Artificial Sequence: Synthetic oligonucleotide
auauguuuucauuucuguagggaaa

SEQ ID NO: 162410 - RNA, 25 nt, Artificial Sequence
  Description of Artificial Sequence: Synthetic oligonucleotide
aaugggauugcugcuuuaaauuucu

SEQ ID NO: 162411 - RNA, 25 nt, Artificial Sequence
  Description of Artificial Sequence: Synthetic oligonucleotide
ugagcuagggauuuuuuggcagcug

SEQ ID NO: 162412 - RNA, 25 nt, Artificial Sequence
  Description of Artificial Sequence: Synthetic oligonucleotide
gcaguguuggcgacuauuguaaaau

SEQ ID NO: 162413 - RNA, 25 nt, Artificial Sequence
  Description of Artificial Sequence: Synthetic oligonucleotide
uucucuuuguuucucucuguaaaua

SEQ ID NO: 162414 - RNA, 25 nt, Artificial Sequence
  Description of Artificial Sequence: Synthetic oligonucleotide
agcaccugcuaacauuacaauuugu

SEQ ID NO: 162415 - RNA, 25 nt, Artificial Sequence
  Description of Artificial Sequence: Synthetic oligonucleotide
uauuuauguuuaaagaaggcaucau

SEQ ID NO: 162416 - RNA, 25 nt, Artificial Sequence
  Description of Artificial Sequence: Synthetic oligonucleotide
uuuggugaacagaacuaggaaauga

SEQ ID NO: 162417 - RNA, 25 nt, Artificial Sequence
  Description of Artificial Sequence: Synthetic oligonucleotide
aauuuuuagcucuuaaaagcauuug

SEQ ID NO: 162418 - RNA, 25 nt, Artificial Sequence
  Description of Artificial Sequence: Synthetic oligonucleotide
gcuuugagaccgcacaggagugucu

SEQ ID NO: 162419 - RNA, 25 nt, Artificial Sequence
  Description of Artificial Sequence: Synthetic oligonucleotide
uuuccuuguaaaacagugaugauaa

SEQ ID NO: 162420 - RNA, 25 nt, Artificial Sequence
  Description of Artificial Sequence: Synthetic oligonucleotide
auuucugccuuggcccuaccuugaa

SEQ ID NO: 162421 - RNA, 25 nt, Artificial Sequence
  Description of Artificial Sequence: Synthetic oligonucleotide
agcaauguugugugaagggaugaag

SEQ ID NO: 162422 - RNA, 25 nt, Artificial Sequence
  Description of Artificial Sequence: Synthetic oligonucleotide
gaaucuaaaagucuucauaaguccu

SEQ ID NO: 162423 - RNA, 25 nt, Artificial Sequence
  Description of Artificial Sequence: Synthetic oligonucleotide
uugggagaggugcuagaaaaauaua

SEQ ID NO: 162424 - RNA, 25 nt, Artificial Sequence
  Description of Artificial Sequence: Synthetic oligonucleotide
aaggcacuaucauaauuacagugau

SEQ ID NO: 162425 - RNA, 25 nt, Artificial Sequence
  Description of Artificial Sequence: Synthetic oligonucleotide
uguccuugcuguuacuacucaaauc

SEQ ID NO: 162426 - RNA, 25 nt, Artificial Sequence
  Description of Artificial Sequence: Synthetic oligonucleotide
cacccacaaauuuccccaaagacug

SEQ ID NO: 162427 - RNA, 25 nt, Artificial Sequence
  Description of Artificial Sequence: Synthetic oligonucleotide
gcgcuagcugucaaauaaaagacag

SEQ ID NO: 162428 - RNA, 25 nt, Artificial Sequence
  Description of Artificial Sequence: Synthetic oligonucleotide
aacaccaaaccaaaccguaugcccg

SEQ ID NO: 162429 - RNA, 25 nt, Artificial Sequence
  Description of Artificial Sequence: Synthetic oligonucleotide
guagcuccauauuggacauccccag

SEQ ID NO: 162430 - RNA, 25 nt, Artificial Sequence
  Description of Artificial Sequence: Synthetic oligonucleotide
gaaaagauggaaaagaaauugcaug

SEQ ID NO: 162431 - RNA, 25 nt, Artificial Sequence
  Description of Artificial Sequence: Synthetic oligonucleotide
gcagugccggcugccaagacaguga

SEQ ID NO: 162432 - RNA, 25 nt, Artificial Sequence
  Description of Artificial Sequence: Synthetic oligonucleotide
aaguucaaaugcccuuccaguggga

SEQ ID NO: 162433 - RNA, 25 nt, Artificial Sequence
  Description of Artificial Sequence: Synthetic oligonucleotide
accccaaaccccacacugcgcuggu

SEQ ID NO: 162434 - RNA, 25 nt, Artificial Sequence
  Description of Artificial Sequence: Synthetic oligonucleotide
uugaaaaauggcaaagaauucaaac

SEQ ID NO: 162435 - RNA, 25 nt, Artificial Sequence
  Description of Artificial Sequence: Synthetic oligonucleotide
ccugaccacagaauuggaggcuaca

SEQ ID NO: 162436 - RNA, 25 nt, Artificial Sequence
  Description of Artificial Sequence: Synthetic oligonucleotide
aagguccguuaugccaccuggagca

SEQ ID NO: 162437 - RNA, 25 nt, Artificial Sequence
  Description of Artificial Sequence: Synthetic oligonucleotide
aucauaauggacucuguggugcccu

SEQ ID NO: 162438 - RNA, 25 nt, Artificial Sequence
  Description of Artificial Sequence: Synthetic oligonucleotide
ucugacaagggcaacuacaccugca

SEQ ID NO: 162439 - RNA, 25 nt, Artificial Sequence
  Description of Artificial Sequence: Synthetic oligonucleotide
auuguggagaaugaguacggcagca

SEQ ID NO: 162440 - RNA, 25 nt, Artificial Sequence
  Description of Artificial Sequence: Synthetic oligonucleotide
aucaaccacacauaccagcuggaug

SEQ ID NO: 162441 - RNA, 25 nt, Artificial Sequence
  Description of Artificial Sequence: Synthetic oligonucleotide
gucguggagcgguccccucaccggc

SEQ ID NO: 162442 - RNA, 25 nt, Artificial Sequence
  Description of Artificial Sequence: Synthetic oligonucleotide
cccauccugcaagcaggguugcccg

SEQ ID NO: 162443 - RNA, 25 nt, Artificial Sequence
  Description of Artificial Sequence: Synthetic oligonucleotide
gccaacaaaacaguggcccugggua

SEQ ID NO: 162444 - RNA, 25 nt, Artificial Sequence
  Description of Artificial Sequence: Synthetic oligonucleotide
agcaacguggaguucauguguaagg

SEQ ID NO: 162445 - RNA, 25 nt, Artificial Sequence
  Description of Artificial Sequence: Synthetic oligonucleotide
guguacagugacccgcagccgcaca

SEQ ID NO: 162446 - RNA, 25 nt, Artificial Sequence
  Description of Artificial Sequence: Synthetic oligonucleotide
auccaguggcuaaagcacaucgagg

SEQ ID NO: 162447 - RNA, 25 nt, Artificial Sequence
  Description of Artificial Sequence: Synthetic oligonucleotide
gugaaugggagcaagauuggcccag

SEQ ID NO: 162448 - RNA, 25 nt, Artificial Sequence
  Description of Artificial Sequence: Synthetic oligonucleotide
gacaaccugccuuauguccagaucu

SEQ ID NO: 162449 - RNA, 25 nt, Artificial Sequence
  Description of Artificial Sequence: Synthetic oligonucleotide
uugaagacugcuggaguuaauacca

SEQ ID NO: 162450 - RNA, 25 nt, Artificial Sequence
  Description of Artificial Sequence: Synthetic oligonucleotide
accgacaaagagauggaggugcuuc

SEQ ID NO: 162451 - RNA, 25 nt, Artificial Sequence
  Description of Artificial Sequence: Synthetic oligonucleotide
cacuuaagaaaugucuccuuugagg

SEQ ID NO: 162452 - RNA, 25 nt, Artificial Sequence
  Description of Artificial Sequence: Synthetic oligonucleotide
gacgcaggggaguauacgugcuugg

SEQ ID NO: 162453 - RNA, 25 nt, Artificial Sequence
  Description of Artificial Sequence: Synthetic oligonucleotide
gcggguaacucuaucggacucuccc

SEQ ID NO: 162454 - RNA, 25 nt, Artificial Sequence
  Description of Artificial Sequence: Synthetic oligonucleotide
caucacucugcaugguugaccguuc

SEQ ID NO: 162455 - RNA, 25 nt, Artificial Sequence
  Description of Artificial Sequence: Synthetic oligonucleotide
cuggaagcccuggaagagaggccgg

SEQ ID NO: 162456 - RNA, 25 nt, Artificial Sequence
  Description of Artificial Sequence: Synthetic oligonucleotide
gcagugaugaccucgccccuguacc

SEQ ID NO: 162457 - RNA, 25 nt, Artificial Sequence
  Description of Artificial Sequence: Synthetic oligonucleotide
cuggagaucaucaucuauugcacag

SEQ ID NO: 162458 - RNA, 25 nt, Artificial Sequence
  Description of Artificial Sequence: Synthetic oligonucleotide
ggggccuuccucaucuccugcaugg

SEQ ID NO: 162459 - RNA, 25 nt, Artificial Sequence
  Description of Artificial Sequence: Synthetic oligonucleotide
guggggucggucaucgucuacaaga

SEQ ID NO: 162460 - RNA, 25 nt, Artificial Sequence
  Description of Artificial Sequence: Synthetic oligonucleotide
augaagagugguaccaagaagagug

SEQ ID NO: 162461 - RNA, 25 nt, Artificial Sequence
  Description of Artificial Sequence: Synthetic oligonucleotide
gacuuccacagccagauggcugugc

SEQ ID NO: 162462 - RNA, 25 nt, Artificial Sequence
  Description of Artificial Sequence: Synthetic oligonucleotide
cacaagcuggccaagagcaucccuc

SEQ ID NO: 162463 - RNA, 25 nt, Artificial Sequence
  Description of Artificial Sequence: Synthetic oligonucleotide
cugcgcagacagguaacagugucug

SEQ ID NO: 162464 - RNA, 25 nt, Artificial Sequence
  Description of Artificial Sequence: Synthetic oligonucleotide
gcugacuccagugcauccaugaacu

SEQ ID NO: 162465 - RNA, 25 nt, Artificial Sequence
  Description of Artificial Sequence: Synthetic oligonucleotide
ucugggguucuucugguucggccau

SEQ ID NO: 162466 - RNA, 25 nt, Artificial Sequence
  Description of Artificial Sequence: Synthetic oligonucleotide
ucacggcucuccuccagugggacuc

SEQ ID NO: 162467 - RNA, 25 nt, Artificial Sequence
  Description of Artificial Sequence: Synthetic oligonucleotide
cccaugcuagcaggggucucugagu

SEQ ID NO: 162468 - RNA, 25 nt, Artificial Sequence
  Description of Artificial Sequence: Synthetic oligonucleotide
uaugagcuucccgaagacccucgcu

SEQ ID NO: 162469 - RNA, 25 nt, Artificial Sequence
  Description of Artificial Sequence: Synthetic oligonucleotide
ugggagcugccucgggacagacugg

SEQ ID NO: 162470 - RNA, 25 nt, Artificial Sequence
  Description of Artificial Sequence: Synthetic oligonucleotide
gucuuaggcaaaccccugggagagg

SEQ ID NO: 162471 - RNA, 25 nt, Artificial Sequence
  Description of Artificial Sequence: Synthetic oligonucleotide
ggcugcuuugggcaggugguguugg

SEQ ID NO: 162472 - RNA, 25 nt, Artificial Sequence
  Description of Artificial Sequence: Synthetic oligonucleotide
gcagaggcuaucgggcuggacaagg

SEQ ID NO: 162473 - RNA, 25 nt, Artificial Sequence
  Description of Artificial Sequence: Synthetic oligonucleotide
gacaaacccaaccgugugaccaaag

SEQ ID NO: 162474 - RNA, 25 nt, Artificial Sequence
  Description of Artificial Sequence: Synthetic oligonucleotide
guggcugugaagauguugaagucgg

SEQ ID NO: 162475 - RNA, 25 nt, Artificial Sequence
  Description of Artificial Sequence: Synthetic oligonucleotide
gacgcaacagagaaagacuugucag

SEQ ID NO: 162476 - RNA, 25 nt, Artificial Sequence
  Description of Artificial Sequence: Synthetic oligonucleotide
gaccugaucucagaaauggagauga

SEQ ID NO: 162477 - RNA, 25 nt, Artificial Sequence
  Description of Artificial Sequence: Synthetic oligonucleotide
augaagaugaucgggaagcauaaga

SEQ ID NO: 162478 - RNA, 25 nt, Artificial Sequence
  Description of Artificial Sequence: Synthetic oligonucleotide
aauaucaucaaccugcugggggccu

SEQ ID NO: 162479 - RNA, 25 nt, Artificial Sequence
  Description of Artificial Sequence: Synthetic oligonucleotide
ugcacgcaggauggucccuuguaug

SEQ ID NO: 162480 - RNA, 25 nt, Artificial Sequence
  Description of Artificial Sequence: Synthetic oligonucleotide
gucaucguggaguaugccuccaagg

SEQ ID NO: 162481 - RNA, 25 nt, Artificial Sequence
  Description of Artificial Sequence: Synthetic oligonucleotide
ggcaaccugcgggaguaccugcagg

SEQ ID NO: 162482 - RNA, 25 nt, Artificial Sequence
  Description of Artificial Sequence: Synthetic oligonucleotide
gcccggaggcccccagggcuggaau

SEQ ID NO: 162483 - RNA, 25 nt, Artificial Sequence
  Description of Artificial Sequence: Synthetic oligonucleotide
uacugcuacaaccccagccacaacc

SEQ ID NO: 162484 - RNA, 25 nt, Artificial Sequence
  Description of Artificial Sequence: Synthetic oligonucleotide
ccagaggagcagcucuccuccaagg

SEQ ID NO: 162485 - RNA, 25 nt, Artificial Sequence
  Description of Artificial Sequence: Synthetic oligonucleotide
gaccugguguccugcgccuaccagg

SEQ ID NO: 162486 - RNA, 25 nt, Artificial Sequence
  Description of Artificial Sequence: Synthetic oligonucleotide
guggcccgaggcauggaguaucugg

SEQ ID NO: 162487 - RNA, 25 nt, Artificial Sequence
  Description of Artificial Sequence: Synthetic oligonucleotide
gccuccaagaagugcauacaccgag

SEQ ID NO: 162488 - RNA, 25 nt, Artificial Sequence
  Description of Artificial Sequence: Synthetic oligonucleotide
gaccuggcagccaggaauguccugg

SEQ ID NO: 162489 - RNA, 25 nt, Artificial Sequence
  Description of Artificial Sequence: Synthetic oligonucleotide
gugacagaggacaaugugaugaaga

SEQ ID NO: 162490 - RNA, 25 nt, Artificial Sequence
  Description of Artificial Sequence: Synthetic oligonucleotide
auagcagacuuuggccucgcacggg

SEQ ID NO: 162491 - RNA, 25 nt, Artificial Sequence
  Description of Artificial Sequence: Synthetic oligonucleotide
gacauucaccacaucgacuacuaua

SEQ ID NO: 162492 - RNA, 25 nt, Artificial Sequence
  Description of Artificial Sequence: Synthetic oligonucleotide
aaaaagacaaccaacggccgacugc

SEQ ID NO: 162493 - RNA, 25 nt, Artificial Sequence
  Description of Artificial Sequence: Synthetic oligonucleotide
ccugugaaguggauggcacccgagg

SEQ ID NO: 162494 - RNA, 25 nt, Artificial Sequence
  Description of Artificial Sequence: Synthetic oligonucleotide
gcauuauuugaccggaucuacaccc

SEQ ID NO: 162495 - RNA, 25 nt, Artificial Sequence
  Description of Artificial Sequence: Synthetic oligonucleotide
caccagagugauguguggucuuucg

SEQ ID NO: 162496 - RNA, 25 nt, Artificial Sequence
  Description of Artificial Sequence: Synthetic oligonucleotide
ggggugcuccugugggagaucuuca

SEQ ID NO: 162497 - RNA, 25 nt, Artificial Sequence
  Description of Artificial Sequence: Synthetic oligonucleotide
acucugggcggcuccccauaccccg

SEQ ID NO: 162498 - RNA, 25 nt, Artificial Sequence
  Description of Artificial Sequence: Synthetic oligonucleotide
ggugugccuguggaggaacuuuuca

SEQ ID NO: 162499 - RNA, 25 nt, Artificial Sequence
  Description of Artificial Sequence: Synthetic oligonucleotide
aagcugcugaaggagggucaccgca

SEQ ID NO: 162500 - RNA, 25 nt, Artificial Sequence
  Description of Artificial Sequence: Synthetic oligonucleotide
auggacaagcccaguaacugcacca

SEQ ID NO: 162501 - RNA, 25 nt, Artificial Sequence
  Description of Artificial Sequence: Synthetic oligonucleotide
aacgagcuguacaugaugaugcggg

SEQ ID NO: 162502 - RNA, 25 nt, Artificial Sequence
  Description of Artificial Sequence: Synthetic oligonucleotide
gacugcuggcaugcagugcccucac

SEQ ID NO: 162503 - RNA, 25 nt, Artificial Sequence
  Description of Artificial Sequence: Synthetic oligonucleotide
cagagacccaccuucaagcagcugg

SEQ ID NO: 162504 - RNA, 25 nt, Artificial Sequence
  Description of Artificial Sequence: Synthetic oligonucleotide
guggaagaccuggaccgcaucgugg

SEQ ID NO: 162505 - RNA, 25 nt, Artificial Sequence
  Description of Artificial Sequence: Synthetic oligonucleotide
gccuugaccuccaaccaggaguacc

SEQ ID NO: 162506 - RNA, 25 nt, Artificial Sequence
  Description of Artificial Sequence: Synthetic oligonucleotide
cuggaccuguccaugccccuggacc

SEQ ID NO: 162507 - RNA, 25 nt, Artificial Sequence
  Description of Artificial Sequence: Synthetic oligonucleotide
caguacucccccagcuuucccgaca

SEQ ID NO: 162508 - RNA, 25 nt, Artificial Sequence
  Description of Artificial Sequence: Synthetic oligonucleotide
acccggagcucuacgugcuccucag

SEQ ID NO: 162509 - RNA, 25 nt, Artificial Sequence
  Description of Artificial Sequence: Synthetic oligonucleotide
ggggaggauuccgucuucucucaug

SEQ ID NO: 162510 - RNA, 25 nt, Artificial Sequence
  Description of Artificial Sequence: Synthetic oligonucleotide
gagccgcugcccgaggagcccugcc

SEQ ID NO: 162511 - RNA, 25 nt, Artificial Sequence
  Description of Artificial Sequence: Synthetic oligonucleotide
cugccccgacacccagcccagcuug

SEQ ID NO: 162512 - RNA, 25 nt, Artificial Sequence
  Description of Artificial Sequence: Synthetic oligonucleotide
gccaauggcggacucaaacgccgcu

SEQ ID NO: 162513 - RNA, 25 nt, Artificial Sequence
  Description of Artificial Sequence: Synthetic oligonucleotide
ugacugccacccacacgcccucccc

SEQ ID NO: 162514 - RNA, 25 nt, Artificial Sequence
  Description of Artificial Sequence: Synthetic oligonucleotide
cagacuccaccgucagcuguaaccc

SEQ ID NO: 162515 - RNA, 25 nt, Artificial Sequence
  Description of Artificial Sequence: Synthetic oligonucleotide
cucacccacagccccugcugggccc

SEQ ID NO: 162516 - RNA, 25 nt, Artificial Sequence
  Description of Artificial Sequence: Synthetic oligonucleotide
caccaccuguccgucccuguccccu

SEQ ID NO: 162517 - RNA, 25 nt, Artificial Sequence
  Description of Artificial Sequence: Synthetic oligonucleotide
uuuccugcuggcaggagccggcugc

SEQ ID NO: 162518 - RNA, 25 nt, Artificial Sequence
  Description of Artificial Sequence: Synthetic oligonucleotide
ccuaccaggggccuuccuguguggc

SEQ ID NO: 162519 - RNA, 25 nt, Artificial Sequence
  Description of Artificial Sequence: Synthetic oligonucleotide
ccugccuucaccccacucagcucac

SEQ ID NO: 162520 - RNA, 25 nt, Artificial Sequence
  Description of Artificial Sequence: Synthetic oligonucleotide
ccucucccuccaccuccucuccacc

SEQ ID NO: 162521 - RNA, 25 nt, Artificial Sequence
  Description of Artificial Sequence: Synthetic oligonucleotide
cugcuggugagaggugcaaagaggc

SEQ ID NO: 162522 - RNA, 25 nt, Artificial Sequence
  Description of Artificial Sequence: Synthetic oligonucleotide
cagaucuuugcugccagccacuuca

SEQ ID NO: 162523 - RNA, 25 nt, Artificial Sequence
  Description of Artificial Sequence: Synthetic oligonucleotide
auccccucccagauguuggaccaac

SEQ ID NO: 162524 - RNA, 25 nt, Artificial Sequence
  Description of Artificial Sequence: Synthetic oligonucleotide
caccccucccugccaccaggcacug

SEQ ID NO: 162525 - RNA, 25 nt, Artificial Sequence
  Description of Artificial Sequence: Synthetic oligonucleotide
gccuggagggcagggagugggagcc

SEQ ID NO: 162526 - RNA, 25 nt, Artificial Sequence
  Description of Artificial Sequence: Synthetic oligonucleotide
caaugaacaggcaugcaagugagag

SEQ ID NO: 162527 - RNA, 25 nt, Artificial Sequence
  Description of Artificial Sequence: Synthetic oligonucleotide
gcuuccugagcuuucuccugucggu

SEQ ID NO: 162528 - RNA, 25 nt, Artificial Sequence
  Description of Artificial Sequence: Synthetic oligonucleotide
uuuggucuguuuugccuucacccau

SEQ ID NO: 162529 - RNA, 25 nt, Artificial Sequence
  Description of Artificial Sequence: Synthetic oligonucleotide
uaagccccucgcacucugguggcag

SEQ ID NO: 162530 - RNA, 25 nt, Artificial Sequence
  Description of Artificial Sequence: Synthetic oligonucleotide
ggugccuuguccucagggcuacagc

SEQ ID NO: 162531 - RNA, 25 nt, Artificial Sequence
  Description of Artificial Sequence: Synthetic oligonucleotide
caguagggaggucagugcuucgugc

SEQ ID NO: 162532 - RNA, 25 nt, Artificial Sequence
  Description of Artificial Sequence: Synthetic oligonucleotide
ccucgauugaaggugaccucugccc

SEQ ID NO: 162533 - RNA, 25 nt, Artificial Sequence
  Description of Artificial Sequence: Synthetic oligonucleotide
ccagauagguggugccaguggcuua

SEQ ID NO: 162534 - RNA, 25 nt, Artificial Sequence
  Description of Artificial Sequence: Synthetic oligonucleotide
auuaauuccgauacuaguuugcuuu

SEQ ID NO: 162535 - RNA, 25 nt, Artificial Sequence
  Description of Artificial Sequence: Synthetic oligonucleotide
ugcugaccaaaugccugguaccaga

SEQ ID NO: 162536 - RNA, 25 nt, Artificial Sequence
  Description of Artificial Sequence: Synthetic oligonucleotide
aggauggugaggcgaaggccagguu

SEQ ID NO: 162537 - RNA, 25 nt, Artificial Sequence
  Description of Artificial Sequence: Synthetic oligonucleotide
ugggggcaguguuguggcccugggg

SEQ ID NO: 162538 - RNA, 25 nt, Artificial Sequence
  Description of Artificial Sequence: Synthetic oligonucleotide
gcccagccccaaacugggggcucug

SEQ ID NO: 162539 - RNA, 25 nt, Artificial Sequence
  Description of Artificial Sequence: Synthetic oligonucleotide
guauauagcuaugaagaaaacacaa

SEQ ID NO: 162540 - RNA, 25 nt, Artificial Sequence
  Description of Artificial Sequence: Synthetic oligonucleotide
aaguguauaaaucugaguauauauu

SEQ ID NO: 162541 - RNA, 25 nt, Artificial Sequence
  Description of Artificial Sequence: Synthetic oligonucleotide
uuacaugucuuuuuaaaagggucgu

SEQ ID NO: 162542 - RNA, 25 nt, Artificial Sequence
  Description of Artificial Sequence: Synthetic oligonucleotide
uuaccagagauuuacccaucgggua

SEQ ID NO: 162543 - RNA, 25 nt, Artificial Sequence
  Description of Artificial Sequence: Synthetic oligonucleotide
aagaugcuccugguggcugggaggc

SEQ ID NO: 162544 - RNA, 25 nt, Artificial Sequence
  Description of Artificial Sequence: Synthetic oligonucleotide
caucaguugcuauauauuaaaaaca

SEQ ID NO: 162545 - RNA, 25 nt, Artificial Sequence
  Description of Artificial Sequence: Synthetic oligonucleotide
aaaaaagaaaaaaaaggaaaauguu

SEQ ID NO: 162546 - RNA, 25 nt, Artificial Sequence
  Description of Artificial Sequence: Synthetic oligonucleotide
uuuuaaaaaggucauauauuuuuug

SEQ ID NO: 162547 - RNA, 25 nt, Artificial Sequence
  Description of Artificial Sequence: Synthetic oligonucleotide
gcuacuuuugcuguuuuauuuuuuu

SEQ ID NO: 162548 - RNA, 25 nt, Artificial Sequence
  Description of Artificial Sequence: Synthetic oligonucleotide
uaaauuauguucuaaaccuauuuuc

SEQ ID NO: 162549 - RNA, 25 nt, Artificial Sequence
  Description of Artificial Sequence: Synthetic oligonucleotide
caguuuaggucccucaauaaaaauu

SEQ ID NO: 162550 - RNA, 25 nt, Artificial Sequence
  Description of Artificial Sequence: Synthetic oligonucleotide
ugcugcugcuucauuuaucuauggg

SEQ ID NO: 162551 - RNA, 25 nt, Artificial Sequence
  Description of Artificial Sequence: Synthetic oligonucleotide
gcuguaugaaaagggugggaauguc

SEQ ID NO: 162552 - RNA, 25 nt, Artificial Sequence
  Description of Artificial Sequence: Synthetic oligonucleotide
ccacuggaaagaagggacacccacg

SEQ ID NO: 162553 - RNA, 25 nt, Artificial Sequence
  Description of Artificial Sequence: Synthetic oligonucleotide
gggcccuggggcuaggucugucccg

SEQ ID NO: 162554 - RNA, 25 nt, Artificial Sequence
  Description of Artificial Sequence: Synthetic oligonucleotide
gagggcaccgcaugcucccggcgca

SEQ ID NO: 162555 - RNA, 25 nt, Artificial Sequence
  Description of Artificial Sequence: Synthetic oligonucleotide
agguuccuuguaaccucuucuuccu

SEQ ID NO: 162556 - RNA, 25 nt, Artificial Sequence
  Description of Artificial Sequence: Synthetic oligonucleotide
uagguccugcacccagaccucacga

SEQ ID NO: 162557 - RNA, 25 nt, Artificial Sequence
  Description of Artificial Sequence: Synthetic oligonucleotide
acgcaccuccugccucuccgcugcu

SEQ ID NO: 162558 - RNA, 25 nt, Artificial Sequence
  Description of Artificial Sequence: Synthetic oligonucleotide
uuuuggaaagucagaaaaagaagau

SEQ ID NO: 162559 - RNA, 25 nt, Artificial Sequence
  Description of Artificial Sequence: Synthetic oligonucleotide
ugucugcuucgagggcaggaacccc

SEQ ID NO: 162560 - RNA, 25 nt, Artificial Sequence
  Description of Artificial Sequence: Synthetic oligonucleotide
cauccaugcaguagaggcgcugggc

SEQ ID NO: 162561 - RNA, 25 nt, Artificial Sequence
  Description of Artificial Sequence: Synthetic oligonucleotide
cagagagucaaggcccagcagccau

SEQ ID NO: 162562 - RNA, 25 nt, Artificial Sequence
  Description of Artificial Sequence: Synthetic oligonucleotide
ucgaccauggaugguuuccuccaag

SEQ ID NO: 162563 - RNA, 25 nt, Artificial Sequence
  Description of Artificial Sequence: Synthetic oligonucleotide
ggaaaccggugggguugggcugggg

SEQ ID NO: 162564 - RNA, 25 nt, Artificial Sequence
  Description of Artificial Sequence: Synthetic oligonucleotide
gagggggcaccuaccuaggaauagc

SEQ ID NO: 162565 - RNA, 25 nt, Artificial Sequence
  Description of Artificial Sequence: Synthetic oligonucleotide
ccacgggguagagcuacagugauua

SEQ ID NO: 162566 - RNA, 25 nt, Artificial Sequence
  Description of Artificial Sequence: Synthetic oligonucleotide
aagaggaaagcaagggcgcgguugc

SEQ ID NO: 162567 - RNA, 25 nt, Artificial Sequence
  Description of Artificial Sequence: Synthetic oligonucleotide
cucacgccuguaaucccagcacuuu

SEQ ID NO: 162568 - RNA, 25 nt, Artificial Sequence
  Description of Artificial Sequence: Synthetic oligonucleotide
ugggacaccgaggugggcagaucac

SEQ ID NO: 162569 - RNA, 25 nt, Artificial Sequence
  Description of Artificial Sequence: Synthetic oligonucleotide
cuucaggucaggaguuugagaccag

SEQ ID NO: 162570 - RNA, 25 nt, Artificial Sequence
  Description of Artificial Sequence: Synthetic oligonucleotide
gccuggccaacuuagugaaacccca

SEQ ID NO: 162571 - RNA, 25 nt, Artificial Sequence
  Description of Artificial Sequence: Synthetic oligonucleotide
aucucuacuaaaaaugcaaaaauua

SEQ ID NO: 162572 - RNA, 25 nt, Artificial Sequence
  Description of Artificial Sequence: Synthetic oligonucleotide
auccaggcaugguggcacacgccug

SEQ ID NO: 162573 - RNA, 25 nt, Artificial Sequence
  Description of Artificial Sequence: Synthetic oligonucleotide
guaaucccagcuccacaggaggcug

SEQ ID NO: 162574 - RNA, 25 nt, Artificial Sequence
  Description of Artificial Sequence: Synthetic oligonucleotide
gaggcagaaucccuugaagcuggga

SEQ ID NO: 162575 - RNA, 25 nt, Artificial Sequence
  Description of Artificial Sequence: Synthetic oligonucleotide
aggcggagguugcagugagccgaga

SEQ ID NO: 162576 - RNA, 25 nt, Artificial Sequence
  Description of Artificial Sequence: Synthetic oligonucleotide
auugcgccauugcacuccagccugg

SEQ ID NO: 162577 - RNA, 25 nt, Artificial Sequence
  Description of Artificial Sequence: Synthetic oligonucleotide
ggcaacagagaaaacaaaaaggaaa

SEQ ID NO: 162578 - RNA, 25 nt, Artificial Sequence
  Description of Artificial Sequence: Synthetic oligonucleotide
aacaaaugaugaaggucugcagaaa

SEQ ID NO: 162579 - RNA, 25 nt, Artificial Sequence
  Description of Artificial Sequence: Synthetic oligonucleotide
acugaaacccagacaugugucugcc

SEQ ID NO: 162580 - RNA, 25 nt, Artificial Sequence
  Description of Artificial Sequence: Synthetic oligonucleotide
ccccucuaugugggcaugguuuugc

SEQ ID NO: 162581 - RNA, 25 nt, Artificial Sequence
  Description of Artificial Sequence: Synthetic oligonucleotide
ccagugcuucuaagugcaggagaac

SEQ ID NO: 162582 - RNA, 25 nt, Artificial Sequence
  Description of Artificial Sequence: Synthetic oligonucleotide
caugucaccugaggcuaguuuugca

SEQ ID NO: 162583 - RNA, 25 nt, Artificial Sequence
  Description of Artificial Sequence: Synthetic oligonucleotide
auucaggucccuggcuucguuucuu

SEQ ID NO: 162584 - RNA, 25 nt, Artificial Sequence
  Description of Artificial Sequence: Synthetic oligonucleotide
uguugguaugccuccccagaucguc

SEQ ID NO: 162585 - RNA, 25 nt, Artificial Sequence
  Description of Artificial Sequence: Synthetic oligonucleotide
ccuuccuguauccaugugaccagac

SEQ ID NO: 162586 - RNA, 25 nt, Artificial Sequence
  Description of Artificial Sequence: Synthetic oligonucleotide
cuguauuuguugggacugucgcaga

SEQ ID NO: 162587 - RNA, 25 nt, Artificial Sequence
  Description of Artificial Sequence: Synthetic oligonucleotide
aucuuggcuucuuacaguucuuccu

SEQ ID NO: 162588 - RNA, 25 nt, Artificial Sequence
  Description of Artificial Sequence: Synthetic oligonucleotide
uguccaaacuccauccugucccuca

SEQ ID NO: 162589 - RNA, 25 nt, Artificial Sequence
  Description of Artificial Sequence: Synthetic oligonucleotide
aggaacggggggaaaauucuccgaa

SEQ ID NO: 162590 - RNA, 25 nt, Artificial Sequence
  Description of Artificial Sequence: Synthetic oligonucleotide
auguuuuugguuuuuuggcugcuug

SEQ ID NO: 162591 - RNA, 25 nt, Artificial Sequence
  Description of Artificial Sequence: Synthetic oligonucleotide
ggaauuuacuucugccaccugcugg

SEQ ID NO: 162592 - RNA, 25 nt, Artificial Sequence
  Description of Artificial Sequence: Synthetic oligonucleotide
gucaucacuguccucacuaagugga

SEQ ID NO: 162593 - RNA, 25 nt, Artificial Sequence
  Description of Artificial Sequence: Synthetic oligonucleotide
auucuggcucccccguaccucaugg

SEQ ID NO: 162594 - RNA, 25 nt, Artificial Sequence
  Description of Artificial Sequence: Synthetic oligonucleotide
gcucaaacuaccacuccucagucgc

SEQ ID NO: 162595 - RNA, 25 nt, Artificial Sequence
  Description of Artificial Sequence: Synthetic oligonucleotide
cuauauuaaagcuuauauuuugcug

SEQ ID NO: 162596 - RNA, 25 nt, Artificial Sequence
  Description of Artificial Sequence: Synthetic oligonucleotide
ggauuacugcuaaauacaaaagaaa

SEQ ID NO: 162597 - RNA, 25 nt, Artificial Sequence
  Description of Artificial Sequence: Synthetic oligonucleotide
aguucaauauguuuucauuucugua

SEQ ID NO: 162598 - RNA, 25 nt, Artificial Sequence
  Description of Artificial Sequence: Synthetic oligonucleotide
agggaaaaugggauugcugcuuuaa

SEQ ID NO: 162599 - RNA, 25 nt, Artificial Sequence
  Description of Artificial Sequence: Synthetic oligonucleotide
aauuucugagcuagggauuuuuugg

SEQ ID NO: 162600 - RNA, 25 nt, Artificial Sequence
  Description of Artificial Sequence: Synthetic oligonucleotide
gcagcugcaguguuggcgacuauug

SEQ ID NO: 162601 - RNA, 25 nt, Artificial Sequence
  Description of Artificial Sequence: Synthetic oligonucleotide
guaaaauucucuuuguuucucucug

SEQ ID NO: 162602 - RNA, 25 nt, Artificial Sequence
  Description of Artificial Sequence: Synthetic oligonucleotide
guaaauagcaccugcuaacauuaca

SEQ ID NO: 162603 - RNA, 25 nt, Artificial Sequence
  Description of Artificial Sequence: Synthetic oligonucleotide
aauuuguauuuauguuuaaagaagg

SEQ ID NO: 162604 - RNA, 25 nt, Artificial Sequence
  Description of Artificial Sequence: Synthetic oligonucleotide
gcaucauuuggugaacagaacuagg

SEQ ID NO: 162605 - RNA, 25 nt, Artificial Sequence
  Description of Artificial Sequence: Synthetic oligonucleotide
gaaaugaauuuuuagcucuuaaaag

SEQ ID NO: 162606 - RNA, 25 nt, Artificial Sequence
  Description of Artificial Sequence: Synthetic oligonucleotide
gcauuugcuuugagaccgcacagga

SEQ ID NO: 162607 - RNA, 25 nt, Artificial Sequence
  Description of Artificial Sequence: Synthetic oligonucleotide
agugucuuuccuuguaaaacaguga

SEQ ID NO: 162608 - RNA, 25 nt, Artificial Sequence
  Description of Artificial Sequence: Synthetic oligonucleotide
augauaauuucugccuuggcccuac

SEQ ID NO: 162609 - RNA, 25 nt, Artificial Sequence
  Description of Artificial Sequence: Synthetic oligonucleotide
ccuugaagcaauguugugugaaggg

SEQ ID NO: 162610 - RNA, 25 nt, Artificial Sequence
  Description of Artificial Sequence: Synthetic oligonucleotide
gaugaagaaucuaaaagucuucaua

SEQ ID NO: 162611 - RNA, 25 nt, Artificial Sequence
  Description of Artificial Sequence: Synthetic oligonucleotide
aaguccuugggagaggugcuagaaa

SEQ ID NO: 162612 - RNA, 25 nt, Artificial Sequence
  Description of Artificial Sequence: Synthetic oligonucleotide
aaauauaaggcacuaucauaauuac

SEQ ID NO: 162613 - RNA, 25 nt, Artificial Sequence
  Description of Artificial Sequence: Synthetic oligonucleotide
cagugauguccuugcuguuacuacu

SEQ ID NO: 162614 - RNA, 25 nt, Artificial Sequence
  Description of Artificial Sequence: Synthetic oligonucleotide
ucaaaucacccacaaauuuccccaa

SEQ ID NO: 162615 - RNA, 25 nt, Artificial Sequence
  Description of Artificial Sequence: Synthetic oligonucleotide
aagacugcgcuagcugucaaauaaa

SEQ ID NO: 162616 - RNA, 25 nt, Artificial Sequence
  Description of Artificial Sequence: Synthetic oligonucleotide
aagacagugaaauugaccugaaaaa

SEQ ID NO: 162617 - RNA, 25 nt, Artificial Sequence
  Description of Artificial Sequence: Synthetic oligonucleotide
aagcagcugguggaagaccuggacc

SEQ ID NO: 162618 - RNA, 25 nt, Artificial Sequence
  Description of Artificial Sequence: Synthetic oligonucleotide
cgcaucguggccuugaccuccaacc

SEQ ID NO: 162619 - RNA, 25 nt, Artificial Sequence
  Description of Artificial Sequence: Synthetic oligonucleotide
caggaguaccuggaccuguccaugc

SEQ ID NO: 162620 - RNA, 25 nt, Artificial Sequence
  Description of Artificial Sequence: Synthetic oligonucleotide
ccccuggaccaguacucccccagcu

SEQ ID NO: 162621 - RNA, 25 nt, Artificial Sequence
  Description of Artificial Sequence: Synthetic oligonucleotide
uuucccgacacccggagcucuacgu

SEQ ID NO: 162622 - RNA, 25 nt, Artificial Sequence
  Description of Artificial Sequence: Synthetic oligonucleotide
ugcuccucaggggaggauuccgucu

SEQ ID NO: 162623 - RNA, 25 nt, Artificial Sequence
  Description of Artificial Sequence: Synthetic oligonucleotide
uucucucaugagccgcugcccgagg

SEQ ID NO: 162624 - RNA, 25 nt, Artificial Sequence
  Description of Artificial Sequence: Synthetic oligonucleotide
gagcccugccugccccgacacccag

SEQ ID NO: 162625 - RNA, 25 nt, Artificial Sequence
  Description of Artificial Sequence: Synthetic oligonucleotide
gcccagcuugccaauggcggacuca

SEQ ID NO: 162626 - RNA, 25 nt, Artificial Sequence
  Description of Artificial Sequence: Synthetic oligonucleotide
aaacgccgcugacugccacccacac

SEQ ID NO: 162627 - RNA, 25 nt, Artificial Sequence
  Description of Artificial Sequence: Synthetic oligonucleotide
cgcccuccccagacuccaccgucag

SEQ ID NO: 162628 - RNA, 25 nt, Artificial Sequence
  Description of Artificial Sequence: Synthetic oligonucleotide
gcuguaacccucacccacagccccu

SEQ ID NO: 162629 - RNA, 25 nt, Artificial Sequence
  Description of Artificial Sequence: Synthetic oligonucleotide
ugcugggcccaccaccuguccgucc

SEQ ID NO: 162630 - RNA, 25 nt, Artificial Sequence
  Description of Artificial Sequence: Synthetic oligonucleotide
ccuguccccuuuccugcuggcagga

SEQ ID NO: 162631 - RNA, 25 nt, Artificial Sequence
  Description of Artificial Sequence: Synthetic oligonucleotide
agccggcugccuaccaggggccuuc

SEQ ID NO: 162632 - RNA, 25 nt, Artificial Sequence
  Description of Artificial Sequence: Synthetic oligonucleotide
ccuguguggccugccuucaccccac

SEQ ID NO: 162633 - RNA, 25 nt, Artificial Sequence
  Description of Artificial Sequence: Synthetic oligonucleotide
cucagcucaccucucccuccaccuc

SEQ ID NO: 162634 - RNA, 25 nt, Artificial Sequence
  Description of Artificial Sequence: Synthetic oligonucleotide
ccucuccaccugcuggugagaggug

SEQ ID NO: 162635 - RNA, 25 nt, Artificial Sequence
  Description of Artificial Sequence: Synthetic oligonucleotide
gcaaagaggcagaucuuugcugcca

SEQ ID NO: 162636 - RNA, 25 nt, Artificial Sequence
  Description of Artificial Sequence: Synthetic oligonucleotide
agccacuucauccccucccagaugu

SEQ ID NO: 162637 - RNA, 25 nt, Artificial Sequence
  Description of Artificial Sequence: Synthetic oligonucleotide
uuggaccaacaccccucccugccac

SEQ ID NO: 162638 - RNA, 25 nt, Artificial Sequence
  Description of Artificial Sequence: Synthetic oligonucleotide
ccaggcacugccuggagggcaggga

SEQ ID NO: 162639 - RNA, 25 nt, Artificial Sequence
  Description of Artificial Sequence: Synthetic oligonucleotide
agugggagccaaugaacaggcaugc

SEQ ID NO: 162640 - RNA, 25 nt, Artificial Sequence
  Description of Artificial Sequence: Synthetic oligonucleotide
caagugagagcuuccugagcuuucu

SEQ ID NO: 162641 - RNA, 25 nt, Artificial Sequence
  Description of Artificial Sequence: Synthetic oligonucleotide
uccugucgguuuggucuguuuugcc

SEQ ID NO: 162642 - RNA, 25 nt, Artificial Sequence
  Description of Artificial Sequence: Synthetic oligonucleotide
cuucacccauaagccccucgcacuc

SEQ ID NO: 162643 - RNA, 25 nt, Artificial Sequence
  Description of Artificial Sequence: Synthetic oligonucleotide
cugguggcaggugccuuguccucag

SEQ ID NO: 162644 - RNA, 25 nt, Artificial Sequence
  Description of Artificial Sequence: Synthetic oligonucleotide
gggcuacagcaguagggaggucagu

SEQ ID NO: 162645 - RNA, 25 nt, Artificial Sequence
  Description of Artificial Sequence: Synthetic oligonucleotide
ugcuucgugccucgauugaagguga

SEQ ID NO: 162646 - RNA, 25 nt, Artificial Sequence
  Description of Artificial Sequence: Synthetic oligonucleotide
accucugccccagauagguggugcc

SEQ ID NO: 162647 - RNA, 25 nt, Artificial Sequence
  Description of Artificial Sequence: Synthetic oligonucleotide
caguggcuuauuaauuccgauacua

SEQ ID NO: 162648 - RNA, 25 nt, Artificial Sequence
  Description of Artificial Sequence: Synthetic oligonucleotide
aguuugcuuugcugaccaaaugccu

SEQ ID NO: 162649 - RNA, 25 nt, Artificial Sequence
  Description of Artificial Sequence: Synthetic oligonucleotide
ugguaccagaggauggugaggcgaa

SEQ ID NO: 162650 - RNA, 25 nt, Artificial Sequence
  Description of Artificial Sequence: Synthetic oligonucleotide
aggccagguugggggcaguguugug

SEQ ID NO: 162651 - RNA, 25 nt, Artificial Sequence
  Description of Artificial Sequence: Synthetic oligonucleotide
ggcccuggggcccagccccaaacug

SEQ ID NO: 162652 - RNA, 25 nt, Artificial Sequence
  Description of Artificial Sequence: Synthetic oligonucleotide
gggggcucuguauauagcuaugaag

SEQ ID NO: 162653 - RNA, 25 nt, Artificial Sequence
  Description of Artificial Sequence: Synthetic oligonucleotide
gaaaacacaaaguguauaaaucuga

SEQ ID NO: 162654 - RNA, 25 nt, Artificial Sequence
  Description of Artificial Sequence: Synthetic oligonucleotide
aguauauauuuacaugucuuuuuaa

SEQ ID NO: 162655 - RNA, 25 nt, Artificial Sequence
  Description of Artificial Sequence: Synthetic oligonucleotide
aaagggucguuaccagagauuuacc

SEQ ID NO: 162656 - RNA, 25 nt, Artificial Sequence
  Description of Artificial Sequence: Synthetic oligonucleotide
ccaucggguaagaugcuccuggugg

SEQ ID NO: 162657 - RNA, 25 nt, Artificial Sequence
  Description of Artificial Sequence: Synthetic oligonucleotide
gcugggaggcaucaguugcuauaua

SEQ ID NO: 162658 - RNA, 25 nt, Artificial Sequence
  Description of Artificial Sequence: Synthetic oligonucleotide
auuaaaaacaaaaaagaaaaaaaag

SEQ ID NO: 162659 - RNA, 25 nt, Artificial Sequence
  Description of Artificial Sequence: Synthetic oligonucleotide
ggaaaauguuuuuaaaaaggucaua

SEQ ID NO: 162660 - RNA, 25 nt, Artificial Sequence
  Description of Artificial Sequence: Synthetic oligonucleotide
auauuuuuugcuacuuuugcuguuu

SEQ ID NO: 162661 - RNA, 25 nt, Artificial Sequence
  Description of Artificial Sequence: Synthetic oligonucleotide
uuauuuuuuuaaauuauguucuaaa

SEQ ID NO: 162662 - RNA, 25 nt, Artificial Sequence
  Description of Artificial Sequence: Synthetic oligonucleotide
accuauuuucaguuuaggucccuca

SEQ ID NO: 162663 - RNA, 25 nt, Artificial Sequence
  Description of Artificial Sequence: Synthetic oligonucleotide
aauaaaaauugcugcugcuucauuu

SEQ ID NO: 162664 - RNA, 25 nt, Artificial Sequence
  Description of Artificial Sequence: Synthetic oligonucleotide
uaucuaugggcuguaugaaaagggu

SEQ ID NO: 162665 - RNA, 25 nt, Artificial Sequence
  Description of Artificial Sequence: Synthetic oligonucleotide
ugggaauguccacuggaaagaaggg

SEQ ID NO: 162666 - RNA, 25 nt, Artificial Sequence
  Description of Artificial Sequence: Synthetic oligonucleotide
gacacccacgggcccuggggcuagg

SEQ ID NO: 162667 - RNA, 25 nt, Artificial Sequence
  Description of Artificial Sequence: Synthetic oligonucleotide
gucugucccgagggcaccgcaugcu

SEQ ID NO: 162668 - RNA, 25 nt, Artificial Sequence
  Description of Artificial Sequence: Synthetic oligonucleotide
ucccggcgcagguuccuuguaaccu

SEQ ID NO: 162669 - RNA, 25 nt, Artificial Sequence
  Description of Artificial Sequence: Synthetic oligonucleotide
ucuucuuccuagguccugcacccag

SEQ ID NO: 162670 - RNA, 25 nt, Artificial Sequence
  Description of Artificial Sequence: Synthetic oligonucleotide
gaccucacgacgcaccuccugccuc

SEQ ID NO: 162671 - RNA, 25 nt, Artificial Sequence
  Description of Artificial Sequence: Synthetic oligonucleotide
cuccgcugcuuuuggaaagucagaa

SEQ ID NO: 162672 - RNA, 25 nt, Artificial Sequence
  Description of Artificial Sequence: Synthetic oligonucleotide
aaaagaagaugucugcuucgagggc

SEQ ID NO: 162673 - RNA, 25 nt, Artificial Sequence
  Description of Artificial Sequence: Synthetic oligonucleotide
caggaaccccauccaugcaguagag

SEQ ID NO: 162674 - RNA, 25 nt, Artificial Sequence
  Description of Artificial Sequence: Synthetic oligonucleotide
ggcgcugggcagagagucaaggccc

SEQ ID NO: 162675 - RNA, 25 nt, Artificial Sequence
  Description of Artificial Sequence: Synthetic oligonucleotide
cagcagccaucgaccauggaugguu

SEQ ID NO: 162676 - RNA, 25 nt, Artificial Sequence
  Description of Artificial Sequence: Synthetic oligonucleotide
uuccuccaaggaaaccggugggguu

SEQ ID NO: 162677 - RNA, 25 nt, Artificial Sequence
  Description of Artificial Sequence: Synthetic oligonucleotide
ugggcuggggagggggcaccuaccu

SEQ ID NO: 162678 - RNA, 25 nt, Artificial Sequence
  Description of Artificial Sequence: Synthetic oligonucleotide
uaggaauagccacgggguagagcua

SEQ ID NO: 162679 - RNA, 25 nt, Artificial Sequence
  Description of Artificial Sequence: Synthetic oligonucleotide
acagugauuaagaggaaagcaaggg

SEQ ID NO: 162680 - RNA, 25 nt, Artificial Sequence
  Description of Artificial Sequence: Synthetic oligonucleotide
gcgcgguugcucacgccuguaaucc

SEQ ID NO: 162681 - RNA, 25 nt, Artificial Sequence
  Description of Artificial Sequence: Synthetic oligonucleotide
ccagcacuuugggacaccgaggugg

SEQ ID NO: 162682 - RNA, 25 nt, Artificial Sequence
  Description of Artificial Sequence: Synthetic oligonucleotide
ggcagaucacuucaggucaggaguu

SEQ ID NO: 162683 - RNA, 25 nt, Artificial Sequence
  Description of Artificial Sequence: Synthetic oligonucleotide
uugagaccagccuggccaacuuagu

SEQ ID NO: 162684 - RNA, 25 nt, Artificial Sequence
  Description of Artificial Sequence: Synthetic oligonucleotide
ugaaaccccaucucuacuaaaaaug

SEQ ID NO: 162685 - RNA, 25 nt, Artificial Sequence
  Description of Artificial Sequence: Synthetic oligonucleotide
gcaaaaauuauccaggcaugguggc

SEQ ID NO: 162686 - RNA, 25 nt, Artificial Sequence
  Description of Artificial Sequence: Synthetic oligonucleotide
cacacgccuguaaucccagcuccac

SEQ ID NO: 162687 - RNA, 25 nt, Artificial Sequence
  Description of Artificial Sequence: Synthetic oligonucleotide
caggaggcugaggcagaaucccuug

SEQ ID NO: 162688 - RNA, 25 nt, Artificial Sequence
  Description of Artificial Sequence: Synthetic oligonucleotide
gaagcugggaggcggagguugcagu

SEQ ID NO: 162689 - RNA, 25 nt, Artificial Sequence
  Description of Artificial Sequence: Synthetic oligonucleotide
ugagccgagauugcgccauugcacu

SEQ ID NO: 162690 - RNA, 25 nt, Artificial Sequence
  Description of Artificial Sequence: Synthetic oligonucleotide
uccagccugggcaacagagaaaaca

SEQ ID NO: 162691 - RNA, 25 nt, Artificial Sequence
  Description of Artificial Sequence: Synthetic oligonucleotide
aaaaaggaaaacaaaugaugaaggu

SEQ ID NO: 162692 - RNA, 25 nt, Artificial Sequence
  Description of Artificial Sequence: Synthetic oligonucleotide
ucugcagaaacugaaacccagacau

SEQ ID NO: 162693 - RNA, 25 nt, Artificial Sequence
  Description of Artificial Sequence: Synthetic oligonucleotide
ugugucugcccccucuaugugggca

SEQ ID NO: 162694 - RNA, 25 nt, Artificial Sequence
  Description of Artificial Sequence: Synthetic oligonucleotide
augguuuugccagugcuucuaagug

SEQ ID NO: 162695 - RNA, 25 nt, Artificial Sequence
  Description of Artificial Sequence: Synthetic oligonucleotide
gcaggagaacaugucaccugaggcu

SEQ ID NO: 162696 - RNA, 25 nt, Artificial Sequence
  Description of Artificial Sequence: Synthetic oligonucleotide
uaguuuugcauucaggucccuggcu

SEQ ID NO: 162697 - RNA, 25 nt, Artificial Sequence
  Description of Artificial Sequence: Synthetic oligonucleotide
uucguuucuuguugguaugccuccc

SEQ ID NO: 162698 - RNA, 25 nt, Artificial Sequence
  Description of Artificial Sequence: Synthetic oligonucleotide
ccagaucguccuuccuguauccaug

SEQ ID NO: 162699 - RNA, 25 nt, Artificial Sequence
  Description of Artificial Sequence: Synthetic oligonucleotide
gugaccagacuguauuuguugggac

SEQ ID NO: 162700 - RNA, 25 nt, Artificial Sequence
  Description of Artificial Sequence: Synthetic oligonucleotide
cugucgcagaucuuggcuucuuaca

SEQ ID NO: 162701 - RNA, 25 nt, Artificial Sequence
  Description of Artificial Sequence: Synthetic oligonucleotide
aguucuuccuguccaaacuccaucc

SEQ ID NO: 162702 - RNA, 25 nt, Artificial Sequence
  Description of Artificial Sequence: Synthetic oligonucleotide
cugucccucaggaacggggggaaaa

SEQ ID NO: 162703 - RNA, 25 nt, Artificial Sequence
  Description of Artificial Sequence: Synthetic oligonucleotide
auucuccgaauguuuuugguuuuuu

SEQ ID NO: 162704 - RNA, 25 nt, Artificial Sequence
  Description of Artificial Sequence: Synthetic oligonucleotide
uggcugcuuggaauuuacuucugcc

SEQ ID NO: 162705 - RNA, 25 nt, Artificial Sequence
  Description of Artificial Sequence: Synthetic oligonucleotide
caccugcuggucaucacuguccuca

SEQ ID NO: 162706 - RNA, 25 nt, Artificial Sequence
  Description of Artificial Sequence: Synthetic oligonucleotide
acuaaguggauucuggcucccccgu

SEQ ID NO: 162707 - RNA, 25 nt, Artificial Sequence
  Description of Artificial Sequence: Synthetic oligonucleotide
uaccucauggcucaaacuaccacuc

SEQ ID NO: 162708 - RNA, 25 nt, Artificial Sequence
  Description of Artificial Sequence: Synthetic oligonucleotide
ccucagucgcuauauuaaagcuuau

SEQ ID NO: 162709 - RNA, 25 nt, Artificial Sequence
  Description of Artificial Sequence: Synthetic oligonucleotide
uauuuugcuggauuacugcuaaaua

SEQ ID NO: 162710 - RNA, 25 nt, Artificial Sequence
  Description of Artificial Sequence: Synthetic oligonucleotide
acaaaagaaaguucaauauguuuuc

SEQ ID NO: 162711 - RNA, 25 nt, Artificial Sequence
  Description of Artificial Sequence: Synthetic oligonucleotide
cauuucuguagggaaaaugggauug

SEQ ID NO: 162712 - RNA, 25 nt, Artificial Sequence
  Description of Artificial Sequence: Synthetic oligonucleotide
gcugcuuuaaauuucugagcuaggg

SEQ ID NO: 162713 - RNA, 25 nt, Artificial Sequence
  Description of Artificial Sequence: Synthetic oligonucleotide
gauuuuuuggcagcugcaguguugg

SEQ ID NO: 162714 - RNA, 25 nt, Artificial Sequence
  Description of Artificial Sequence: Synthetic oligonucleotide
gcgacuauuguaaaauucucuuugu

SEQ ID NO: 162715 - RNA, 25 nt, Artificial Sequence
  Description of Artificial Sequence: Synthetic oligonucleotide
uuucucucuguaaauagcaccugcu

SEQ ID NO: 162716 - RNA, 25 nt, Artificial Sequence
  Description of Artificial Sequence: Synthetic oligonucleotide
uaacauuacaauuuguauuuauguu

SEQ ID NO: 162717 - RNA, 25 nt, Artificial Sequence
  Description of Artificial Sequence: Synthetic oligonucleotide
uuaaagaaggcaucauuuggugaac

SEQ ID NO: 162718 - RNA, 25 nt, Artificial Sequence
  Description of Artificial Sequence: Synthetic oligonucleotide
cagaacuaggaaaugaauuuuuagc

SEQ ID NO: 162719 - RNA, 25 nt, Artificial Sequence
  Description of Artificial Sequence: Synthetic oligonucleotide
cucuuaaaagcauuugcuuugagac

SEQ ID NO: 162720 - RNA, 25 nt, Artificial Sequence
  Description of Artificial Sequence: Synthetic oligonucleotide
ccgcacaggagugucuuuccuugua

SEQ ID NO: 162721 - RNA, 25 nt, Artificial Sequence
  Description of Artificial Sequence: Synthetic oligonucleotide
aaaacagugaugauaauuucugccu

SEQ ID NO: 162722 - RNA, 25 nt, Artificial Sequence
  Description of Artificial Sequence: Synthetic oligonucleotide
uuggcccuaccuugaagcaauguug

SEQ ID NO: 162723 - RNA, 25 nt, Artificial Sequence
  Description of Artificial Sequence: Synthetic oligonucleotide
gugugaagggaugaagaaucuaaaa

SEQ ID NO: 162724 - RNA, 25 nt, Artificial Sequence
  Description of Artificial Sequence: Synthetic oligonucleotide
agucuucauaaguccuugggagagg

SEQ ID NO: 162725 - RNA, 25 nt, Artificial Sequence
  Description of Artificial Sequence: Synthetic oligonucleotide
gugcuagaaaaauauaaggcacuau

SEQ ID NO: 162726 - RNA, 25 nt, Artificial Sequence
  Description of Artificial Sequence: Synthetic oligonucleotide
ucauaauuacagugauguccuugcu

SEQ ID NO: 162727 - RNA, 25 nt, Artificial Sequence
  Description of Artificial Sequence: Synthetic oligonucleotide
uguuacuacucaaaucacccacaaa

SEQ ID NO: 162728 - RNA, 25 nt, Artificial Sequence
  Description of Artificial Sequence: Synthetic oligonucleotide
auuuccccaaagacugcgcuagcug

SEQ ID NO: 162729 - RNA, 25 nt, Artificial Sequence
  Description of Artificial Sequence: Synthetic oligonucleotide
gucaaauaaaagacagugaaauuga

SEQ ID NO: 162730 - RNA, 25 nt, Artificial Sequence
  Description of Artificial Sequence: Synthetic oligonucleotide
accaaaccaaaccguaugcccguag

SEQ ID NO: 162731 - RNA, 25 nt, Artificial Sequence
  Description of Artificial Sequence: Synthetic oligonucleotide
gcuccauauuggacauccccagaaa

SEQ ID NO: 162732 - RNA, 25 nt, Artificial Sequence
  Description of Artificial Sequence: Synthetic oligonucleotide
aagauggaaaagaaauugcaugcag

SEQ ID NO: 162733 - RNA, 25 nt, Artificial Sequence
  Description of Artificial Sequence: Synthetic oligonucleotide
gugccggcugccaagacagugaagu

SEQ ID NO: 162734 - RNA, 25 nt, Artificial Sequence
  Description of Artificial Sequence: Synthetic oligonucleotide
uucaaaugcccuuccagugggaccc

SEQ ID NO: 162735 - RNA, 25 nt, Artificial Sequence
  Description of Artificial Sequence: Synthetic oligonucleotide
ccaaaccccacacugcgcugguuga

SEQ ID NO: 162736 - RNA, 25 nt, Artificial Sequence
  Description of Artificial Sequence: Synthetic oligonucleotide
aaaaauggcaaagaauucaaaccug

SEQ ID NO: 162737 - RNA, 25 nt, Artificial Sequence
  Description of Artificial Sequence: Synthetic oligonucleotide
gaccacagaauuggaggcuacaagg

SEQ ID NO: 162738 - RNA, 25 nt, Artificial Sequence
  Description of Artificial Sequence: Synthetic oligonucleotide
guccguuaugccaccuggagcauca

SEQ ID NO: 162739 - RNA, 25 nt, Artificial Sequence
  Description of Artificial Sequence: Synthetic oligonucleotide
auaauggacucuguggugcccucug

SEQ ID NO: 162740 - RNA, 25 nt, Artificial Sequence
  Description of Artificial Sequence: Synthetic oligonucleotide
gacaagggcaacuacaccugcauug

SEQ ID NO: 162741 - RNA, 25 nt, Artificial Sequence
  Description of Artificial Sequence: Synthetic oligonucleotide
guggagaaugaguacggcagcauca

SEQ ID NO: 162742 - RNA, 25 nt, Artificial Sequence
  Description of Artificial Sequence: Synthetic oligonucleotide
aaccacacauaccagcuggaugucg

SEQ ID NO: 162743 - RNA, 25 nt, Artificial Sequence
  Description of Artificial Sequence: Synthetic oligonucleotide
guggagcgguccccucaccggccca

SEQ ID NO: 162744 - RNA, 25 nt, Artificial Sequence
  Description of Artificial Sequence: Synthetic oligonucleotide
auccugcaagcaggguugcccgcca

SEQ ID NO: 162745 - RNA, 25 nt, Artificial Sequence
  Description of Artificial Sequence: Synthetic oligonucleotide
aacaaaacaguggcccuggguagca

SEQ ID NO: 162746 - RNA, 25 nt, Artificial Sequence
  Description of Artificial Sequence: Synthetic oligonucleotide
aacguggaguucauguguaaggugu

SEQ ID NO: 162747 - RNA, 25 nt, Artificial Sequence
  Description of Artificial Sequence: Synthetic oligonucleotide
uacagugacccgcagccgcacaucc

SEQ ID NO: 162748 - RNA, 25 nt, Artificial Sequence
  Description of Artificial Sequence: Synthetic oligonucleotide
caguggcuaaagcacaucgagguga

SEQ ID NO: 162749 - RNA, 25 nt, Artificial Sequence
  Description of Artificial Sequence: Synthetic oligonucleotide
aaugggagcaagauuggcccagaca

SEQ ID NO: 162750 - RNA, 25 nt, Artificial Sequence
  Description of Artificial Sequence: Synthetic oligonucleotide
aaccugccuuauguccagaucuuga

SEQ ID NO: 162751 - RNA, 25 nt, Artificial Sequence
  Description of Artificial Sequence: Synthetic oligonucleotide
aagacugcuggaguuaauaccaccg

SEQ ID NO: 162752 - RNA, 25 nt, Artificial Sequence
  Description of Artificial Sequence: Synthetic oligonucleotide
gacaaagagauggaggugcuucacu

SEQ ID NO: 162753 - RNA, 25 nt, Artificial Sequence
  Description of Artificial Sequence: Synthetic oligonucleotide
uuaagaaaugucuccuuugaggacg

SEQ ID NO: 162754 - RNA, 25 nt, Artificial Sequence
  Description of Artificial Sequence: Synthetic oligonucleotide
gcaggggaguauacgugcuuggcgg

SEQ ID NO: 162755 - RNA, 25 nt, Artificial Sequence
  Description of Artificial Sequence: Synthetic oligonucleotide
gguaacucuaucggacucucccauc

SEQ ID NO: 162756 - RNA, 25 nt, Artificial Sequence
  Description of Artificial Sequence: Synthetic oligonucleotide
cacucugcaugguugaccguucugg

SEQ ID NO: 162757 - RNA, 25 nt, Artificial Sequence
  Description of Artificial Sequence: Synthetic oligonucleotide
gaagcccuggaagagaggccggcag

SEQ ID NO: 162758 - RNA, 25 nt, Artificial Sequence
  Description of Artificial Sequence: Synthetic oligonucleotide
gugaugaccucgccccuguaccugg

SEQ ID NO: 162759 - RNA, 25 nt, Artificial Sequence
  Description of Artificial Sequence: Synthetic oligonucleotide
gagaucaucaucuauugcacagggg

SEQ ID NO: 162760 - RNA, 25 nt, Artificial Sequence
  Description of Artificial Sequence: Synthetic oligonucleotide
gccuuccucaucuccugcauggugg

SEQ ID NO: 162761 - RNA, 25 nt, Artificial Sequence
  Description of Artificial Sequence: Synthetic oligonucleotide
gggucggucaucgucuacaagauga

SEQ ID NO: 162762 - RNA, 25 nt, Artificial Sequence
  Description of Artificial Sequence: Synthetic oligonucleotide
aagagugguaccaagaagagugacu

SEQ ID NO: 162763 - RNA, 25 nt, Artificial Sequence
  Description of Artificial Sequence: Synthetic oligonucleotide
uuccacagccagauggcugugcaca

SEQ ID NO: 162764 - RNA, 25 nt, Artificial Sequence
  Description of Artificial Sequence: Synthetic oligonucleotide
aagcuggccaagagcaucccucugc

SEQ ID NO: 162765 - RNA, 25 nt, Artificial Sequence
  Description of Artificial Sequence: Synthetic oligonucleotide
cgcagacagguaacagugucugcug

SEQ ID NO: 162766 - RNA, 25 nt, Artificial Sequence
  Description of Artificial Sequence: Synthetic oligonucleotide
gacuccagugcauccaugaacucug

SEQ ID NO: 162767 - RNA, 25 nt, Artificial Sequence
  Description of Artificial Sequence: Synthetic oligonucleotide
gggguucuucugguucggccaucac

SEQ ID NO: 162768 - RNA, 25 nt, Artificial Sequence
  Description of Artificial Sequence: Synthetic oligonucleotide
cggcucuccuccagugggacuccca

SEQ ID NO: 162769 - RNA, 25 nt, Artificial Sequence
  Description of Artificial Sequence: Synthetic oligonucleotide
augcuagcaggggucucugaguaug

SEQ ID NO: 162770 - RNA, 25 nt, Artificial Sequence
  Description of Artificial Sequence: Synthetic oligonucleotide
gagcuucccgaagacccucgcuggg

SEQ ID NO: 162771 - RNA, 25 nt, Artificial Sequence
  Description of Artificial Sequence: Synthetic oligonucleotide
gagcugccucgggacagacuggucu

SEQ ID NO: 162772 - RNA, 25 nt, Artificial Sequence
  Description of Artificial Sequence: Synthetic oligonucleotide
uuaggcaaaccccugggagagggcu

SEQ ID NO: 162773 - RNA, 25 nt, Artificial Sequence
  Description of Artificial Sequence: Synthetic oligonucleotide
ugcuuugggcaggugguguuggcag

SEQ ID NO: 162774 - RNA, 25 nt, Artificial Sequence
  Description of Artificial Sequence: Synthetic oligonucleotide
gaggcuaucgggcuggacaaggaca

SEQ ID NO: 162775 - RNA, 25 nt, Artificial Sequence
  Description of Artificial Sequence: Synthetic oligonucleotide
aaacccaaccgugugaccaaagugg

SEQ ID NO: 162776 - RNA, 25 nt, Artificial Sequence
  Description of Artificial Sequence: Synthetic oligonucleotide
gcugugaagauguugaagucggacg

SEQ ID NO: 162777 - RNA, 25 nt, Artificial Sequence
  Description of Artificial Sequence: Synthetic oligonucleotide
gcaacagagaaagacuugucagacc

SEQ ID NO: 162778 - RNA, 25 nt, Artificial Sequence
  Description of Artificial Sequence: Synthetic oligonucleotide
cugaucucagaaauggagaugauga

SEQ ID NO: 162779 - RNA, 25 nt, Artificial Sequence
  Description of Artificial Sequence: Synthetic oligonucleotide
aagaugaucgggaagcauaagaaua

SEQ ID NO: 162780 - RNA, 25 nt, Artificial Sequence
  Description of Artificial Sequence: Synthetic oligonucleotide
aucaucaaccugcugggggccugca

SEQ ID NO: 162781 - RNA, 25 nt, Artificial Sequence
  Description of Artificial Sequence: Synthetic oligonucleotide
acgcaggauggucccuuguauguca

SEQ ID NO: 162782 - RNA, 25 nt, Artificial Sequence
  Description of Artificial Sequence: Synthetic oligonucleotide
aucguggaguaugccuccaagggca

SEQ ID NO: 162783 - RNA, 25 nt, Artificial Sequence
  Description of Artificial Sequence: Synthetic oligonucleotide
aaccugcgggaguaccugcaggccc

SEQ ID NO: 162784 - RNA, 25 nt, Artificial Sequence
  Description of Artificial Sequence: Synthetic oligonucleotide
cggaggcccccagggcuggaauacu

SEQ ID NO: 162785 - RNA, 25 nt, Artificial Sequence
  Description of Artificial Sequence: Synthetic oligonucleotide
ugcuacaaccccagccacaacccag

SEQ ID NO: 162786 - RNA, 25 nt, Artificial Sequence
  Description of Artificial Sequence: Synthetic oligonucleotide
gaggagcagcucuccuccaaggacc

SEQ ID NO: 162787 - RNA, 25 nt, Artificial Sequence
  Description of Artificial Sequence: Synthetic oligonucleotide
cugguguccugcgccuaccaggugg

SEQ ID NO: 162788 - RNA, 25 nt, Artificial Sequence
  Description of Artificial Sequence: Synthetic oligonucleotide
gcccgaggcauggaguaucuggccu

SEQ ID NO: 162789 - RNA, 25 nt, Artificial Sequence
  Description of Artificial Sequence: Synthetic oligonucleotide
uccaagaagugcauacaccgagacc

SEQ ID NO: 162790 - RNA, 25 nt, Artificial Sequence
  Description of Artificial Sequence: Synthetic oligonucleotide
cuggcagccaggaauguccugguga

SEQ ID NO: 162791 - RNA, 25 nt, Artificial Sequence
  Description of Artificial Sequence: Synthetic oligonucleotide
acagaggacaaugugaugaagauag

SEQ ID NO: 162792 - RNA, 25 nt, Artificial Sequence
  Description of Artificial Sequence: Synthetic oligonucleotide
gcagacuuuggccucgcacgggaca

SEQ ID NO: 162793 - RNA, 25 nt, Artificial Sequence
  Description of Artificial Sequence: Synthetic oligonucleotide
auucaccacaucgacuacuauaaaa

SEQ ID NO: 162794 - RNA, 25 nt, Artificial Sequence
  Description of Artificial Sequence: Synthetic oligonucleotide
aagacaaccaacggccgacugccug

SEQ ID NO: 162795 - RNA, 25 nt, Artificial Sequence
  Description of Artificial Sequence: Synthetic oligonucleotide
gugaaguggauggcacccgaggcau

SEQ ID NO: 162796 - RNA, 25 nt, Artificial Sequence
  Description of Artificial Sequence: Synthetic oligonucleotide
uuauuugaccggaucuacacccacc

SEQ ID NO: 162797 - RNA, 25 nt, Artificial Sequence
  Description of Artificial Sequence: Synthetic oligonucleotide
cagagugauguguggucuuucgggg

SEQ ID NO: 162798 - RNA, 25 nt, Artificial Sequence
  Description of Artificial Sequence: Synthetic oligonucleotide
gugcuccugugggagaucuucacuc

SEQ ID NO: 162799 - RNA, 25 nt, Artificial Sequence
  Description of Artificial Sequence: Synthetic oligonucleotide
cugggcggcuccccauaccccggug

SEQ ID NO: 162800 - RNA, 25 nt, Artificial Sequence
  Description of Artificial Sequence: Synthetic oligonucleotide
gugccuguggaggaacuuuucaagc

SEQ ID NO: 162801 - RNA, 25 nt, Artificial Sequence
  Description of Artificial Sequence: Synthetic oligonucleotide
cugcugaaggagggucaccgcaugg

SEQ ID NO: 162802 - RNA, 25 nt, Artificial Sequence
  Description of Artificial Sequence: Synthetic oligonucleotide
gacaagcccaguaacugcaccaacg

SEQ ID NO: 162803 - RNA, 25 nt, Artificial Sequence
  Description of Artificial Sequence: Synthetic oligonucleotide
gagcuguacaugaugaugcgggacu

SEQ ID NO: 162804 - RNA, 25 nt, Artificial Sequence
  Description of Artificial Sequence: Synthetic oligonucleotide
ugcuggcaugcagugcccucacaga

SEQ ID NO: 162805 - RNA, 25 nt, Artificial Sequence
  Description of Artificial Sequence: Synthetic oligonucleotide
agacccaccuucaagcagcuggugg

SEQ ID NO: 162806 - RNA, 25 nt, Artificial Sequence
  Description of Artificial Sequence: Synthetic oligonucleotide
gaagaccuggaccgcaucguggccu

SEQ ID NO: 162807 - RNA, 25 nt, Artificial Sequence
  Description of Artificial Sequence: Synthetic oligonucleotide
uugaccuccaaccaggaguaccugg

SEQ ID NO: 162808 - RNA, 25 nt, Artificial Sequence
  Description of Artificial Sequence: Synthetic oligonucleotide
gaccuguccaugccccuggaccagu

SEQ ID NO: 162809 - RNA, 25 nt, Artificial Sequence
  Description of Artificial Sequence: Synthetic oligonucleotide
uacucccccagcuuucccgacaccc

SEQ ID NO: 162810 - RNA, 25 nt, Artificial Sequence
  Description of Artificial Sequence: Synthetic oligonucleotide
cggagcucuacgugcuccucagggg

SEQ ID NO: 162811 - RNA, 25 nt, Artificial Sequence
  Description of Artificial Sequence: Synthetic oligonucleotide
gaggauuccgucuucucucaugagc

SEQ ID NO: 162812 - RNA, 25 nt, Artificial Sequence
  Description of Artificial Sequence: Synthetic oligonucleotide
ccgcugcccgaggagcccugccugc

SEQ ID NO: 162813 - RNA, 25 nt, Artificial Sequence
  Description of Artificial Sequence: Synthetic oligonucleotide
ccccgacacccagcccagcuugcca

SEQ ID NO: 162814 - RNA, 25 nt, Artificial Sequence
  Description of Artificial Sequence: Synthetic oligonucleotide
aauggcggacucaaacgccgcugac

SEQ ID NO: 162815 - RNA, 25 nt, Artificial Sequence
  Description of Artificial Sequence: Synthetic oligonucleotide
cugccacccacacgcccuccccaga

SEQ ID NO: 162816 - RNA, 25 nt, Artificial Sequence
  Description of Artificial Sequence: Synthetic oligonucleotide
acuccaccgucagcuguaacccuca

SEQ ID NO: 162817 - RNA, 25 nt, Artificial Sequence
  Description of Artificial Sequence: Synthetic oligonucleotide
acccacagccccugcugggcccacc

SEQ ID NO: 162818 - RNA, 25 nt, Artificial Sequence
  Description of Artificial Sequence: Synthetic oligonucleotide
caccuguccgucccuguccccuuuc

SEQ ID NO: 162819 - RNA, 25 nt, Artificial Sequence
  Description of Artificial Sequence: Synthetic oligonucleotide
ccugcuggcaggagccggcugccua

SEQ ID NO: 162820 - RNA, 25 nt, Artificial Sequence
  Description of Artificial Sequence: Synthetic oligonucleotide
accaggggccuuccuguguggccug

SEQ ID NO: 162821 - RNA, 25 nt, Artificial Sequence
  Description of Artificial Sequence: Synthetic oligonucleotide
gccuucaccccacucagcucaccuc

SEQ ID NO: 162822 - RNA, 25 nt, Artificial Sequence
  Description of Artificial Sequence: Synthetic oligonucleotide
cucccuccaccuccucuccaccugc

SEQ ID NO: 162823 - RNA, 25 nt, Artificial Sequence
  Description of Artificial Sequence: Synthetic oligonucleotide
cuggugagaggugcaaagaggcaga

SEQ ID NO: 162824 - RNA, 25 nt, Artificial Sequence
  Description of Artificial Sequence: Synthetic oligonucleotide
aucuuugcugccagccacuucaucc

SEQ ID NO: 162825 - RNA, 25 nt, Artificial Sequence
  Description of Artificial Sequence: Synthetic oligonucleotide
cccucccagauguuggaccaacacc

SEQ ID NO: 162826 - RNA, 25 nt, Artificial Sequence
  Description of Artificial Sequence: Synthetic oligonucleotide
cccucccugccaccaggcacugccu

SEQ ID NO: 162827 - RNA, 25 nt, Artificial Sequence
  Description of Artificial Sequence: Synthetic oligonucleotide
uggagggcagggagugggagccaau

SEQ ID NO: 162828 - RNA, 25 nt, Artificial Sequence
  Description of Artificial Sequence: Synthetic oligonucleotide
ugaacaggcaugcaagugagagcuu

SEQ ID NO: 162829 - RNA, 25 nt, Artificial Sequence
  Description of Artificial Sequence: Synthetic oligonucleotide
uccugagcuuucuccugucgguuug

SEQ ID NO: 162830 - RNA, 25 nt, Artificial Sequence
  Description of Artificial Sequence: Synthetic oligonucleotide
ggucuguuuugccuucacccauaag

SEQ ID NO: 162831 - RNA, 25 nt, Artificial Sequence
  Description of Artificial Sequence: Synthetic oligonucleotide
gccccucgcacucugguggcaggug

SEQ ID NO: 162832 - RNA, 25 nt, Artificial Sequence
  Description of Artificial Sequence: Synthetic oligonucleotide
gccuuguccucagggcuacagcagu

SEQ ID NO: 162833 - RNA, 25 nt, Artificial Sequence
  Description of Artificial Sequence: Synthetic oligonucleotide
uagggaggucagugcuucgugccuc

SEQ ID NO: 162834 - RNA, 25 nt, Artificial Sequence
  Description of Artificial Sequence: Synthetic oligonucleotide
cgauugaaggugaccucugccccag

SEQ ID NO: 162835 - RNA, 25 nt, Artificial Sequence
  Description of Artificial Sequence: Synthetic oligonucleotide
gauagguggugccaguggcuuauua

SEQ ID NO: 162836 - RNA, 25 nt, Artificial Sequence
  Description of Artificial Sequence: Synthetic oligonucleotide
aauuccgauacuaguuugcuuugcu

SEQ ID NO: 162837 - RNA, 25 nt, Artificial Sequence
  Description of Artificial Sequence: Synthetic oligonucleotide
ugaccaaaugccugguaccagagga

SEQ ID NO: 162838 - RNA, 25 nt, Artificial Sequence
  Description of Artificial Sequence: Synthetic oligonucleotide
auggugaggcgaaggccagguuggg

SEQ ID NO: 162839 - RNA, 25 nt, Artificial Sequence
  Description of Artificial Sequence: Synthetic oligonucleotide
gggcaguguuguggcccuggggccc

SEQ ID NO: 162840 - RNA, 25 nt, Artificial Sequence
  Description of Artificial Sequence: Synthetic oligonucleotide
cagccccaaacugggggcucuguau

SEQ ID NO: 162841 - RNA, 25 nt, Artificial Sequence
  Description of Artificial Sequence: Synthetic oligonucleotide
uauagcuaugaagaaaacacaaagu

SEQ ID NO: 162842 - RNA, 25 nt, Artificial Sequence
  Description of Artificial Sequence: Synthetic oligonucleotide
uguauaaaucugaguauauauuuac

SEQ ID NO: 162843 - RNA, 25 nt, Artificial Sequence
  Description of Artificial Sequence: Synthetic oligonucleotide
caugucuuuuuaaaagggucguuac

SEQ ID NO: 162844 - RNA, 25 nt, Artificial Sequence
  Description of Artificial Sequence: Synthetic oligonucleotide
ccagagauuuacccaucggguaaga

SEQ ID NO: 162845 - RNA, 25 nt, Artificial Sequence
  Description of Artificial Sequence: Synthetic oligonucleotide
augcuccugguggcugggaggcauc

SEQ ID NO: 162846 - RNA, 25 nt, Artificial Sequence
  Description of Artificial Sequence: Synthetic oligonucleotide
caguugcuauauauuaaaaacaaaa

SEQ ID NO: 162847 - RNA, 25 nt, Artificial Sequence
  Description of Artificial Sequence: Synthetic oligonucleotide
aaagaaaaaaaaggaaaauguuuuu

SEQ ID NO: 162848 - RNA, 25 nt, Artificial Sequence
  Description of Artificial Sequence: Synthetic oligonucleotide
uaaaaaggucauauauuuuuugcua

SEQ ID NO: 162849 - RNA, 25 nt, Artificial Sequence
  Description of Artificial Sequence: Synthetic oligonucleotide
acuuuugcuguuuuauuuuuuuaaa

SEQ ID NO: 162850 - RNA, 25 nt, Artificial Sequence
  Description of Artificial Sequence: Synthetic oligonucleotide
auuauguucuaaaccuauuuucagu

SEQ ID NO: 162851 - RNA, 25 nt, Artificial Sequence
  Description of Artificial Sequence: Synthetic oligonucleotide
uuuaggucccucaauaaaaauugcu

SEQ ID NO: 162852 - RNA, 25 nt, Artificial Sequence
  Description of Artificial Sequence: Synthetic oligonucleotide
ugcugcuucauuuaucuaugggcug

SEQ ID NO: 162853 - RNA, 25 nt, Artificial Sequence
  Description of Artificial Sequence: Synthetic oligonucleotide
guaugaaaagggugggaauguccac

SEQ ID NO: 162854 - RNA, 25 nt, Artificial Sequence
  Description of Artificial Sequence: Synthetic oligonucleotide
cuggaaagaagggacacccacgggc

SEQ ID NO: 162855 - RNA, 25 nt, Artificial Sequence
  Description of Artificial Sequence: Synthetic oligonucleotide
cccuggggcuaggucugucccgagg

SEQ ID NO: 162856 - RNA, 25 nt, Artificial Sequence
  Description of Artificial Sequence: Synthetic oligonucleotide
ggcaccgcaugcucccggcgcaggu

SEQ ID NO: 162857 - RNA, 25 nt, Artificial Sequence
  Description of Artificial Sequence: Synthetic oligonucleotide
uuccuuguaaccucuucuuccuagg

SEQ ID NO: 162858 - RNA, 25 nt, Artificial Sequence
  Description of Artificial Sequence: Synthetic oligonucleotide
guccugcacccagaccucacgacgc

SEQ ID NO: 162859 - RNA, 25 nt, Artificial Sequence
  Description of Artificial Sequence: Synthetic oligonucleotide
caccuccugccucuccgcugcuuuu

SEQ ID NO: 162860 - RNA, 25 nt, Artificial Sequence
  Description of Artificial Sequence: Synthetic oligonucleotide
uggaaagucagaaaaagaagauguc

SEQ ID NO: 162861 - RNA, 25 nt, Artificial Sequence
  Description of Artificial Sequence: Synthetic oligonucleotide
cugcuucgagggcaggaaccccauc

SEQ ID NO: 162862 - RNA, 25 nt, Artificial Sequence
  Description of Artificial Sequence: Synthetic oligonucleotide
ccaugcaguagaggcgcugggcaga

SEQ ID NO: 162863 - RNA, 25 nt, Artificial Sequence
  Description of Artificial Sequence: Synthetic oligonucleotide
agagucaaggcccagcagccaucga

SEQ ID NO: 162864 - RNA, 25 nt, Artificial Sequence
  Description of Artificial Sequence: Synthetic oligonucleotide
accauggaugguuuccuccaaggaa

SEQ ID NO: 162865 - RNA, 25 nt, Artificial Sequence
  Description of Artificial Sequence: Synthetic oligonucleotide
aaccggugggguugggcuggggagg

SEQ ID NO: 162866 - RNA, 25 nt, Artificial Sequence
  Description of Artificial Sequence: Synthetic oligonucleotide
ggggcaccuaccuaggaauagccac

SEQ ID NO: 162867 - RNA, 25 nt, Artificial Sequence
  Description of Artificial Sequence: Synthetic oligonucleotide
cgggguagagcuacagugauuaaga

SEQ ID NO: 162868 - RNA, 25 nt, Artificial Sequence
  Description of Artificial Sequence: Synthetic oligonucleotide
aggaaagcaagggcgcgguugcuca

SEQ ID NO: 162869 - RNA, 25 nt, Artificial Sequence
  Description of Artificial Sequence: Synthetic oligonucleotide
acgccuguaaucccagcacuuuggg

SEQ ID NO: 162870 - RNA, 25 nt, Artificial Sequence
  Description of Artificial Sequence: Synthetic oligonucleotide
gacaccgaggugggcagaucacuuc

SEQ ID NO: 162871 - RNA, 25 nt, Artificial Sequence
  Description of Artificial Sequence: Synthetic oligonucleotide
caggucaggaguuugagaccagccu

SEQ ID NO: 162872 - RNA, 25 nt, Artificial Sequence
  Description of Artificial Sequence: Synthetic oligonucleotide
uggccaacuuagugaaaccccaucu

SEQ ID NO: 162873 - RNA, 25 nt, Artificial Sequence
  Description of Artificial Sequence: Synthetic oligonucleotide
ucuacuaaaaaugcaaaaauuaucc

SEQ ID NO: 162874 - RNA, 25 nt, Artificial Sequence
  Description of Artificial Sequence: Synthetic oligonucleotide
caggcaugguggcacacgccuguaa

SEQ ID NO: 162875 - RNA, 25 nt, Artificial Sequence
  Description of Artificial Sequence: Synthetic oligonucleotide
aucccagcuccacaggaggcugagg

SEQ ID NO: 162876 - RNA, 25 nt, Artificial Sequence
  Description of Artificial Sequence: Synthetic oligonucleotide
gcagaaucccuugaagcugggaggc

SEQ ID NO: 162877 - RNA, 25 nt, Artificial Sequence
  Description of Artificial Sequence: Synthetic oligonucleotide
cggagguugcagugagccgagauug

SEQ ID NO: 162878 - RNA, 25 nt, Artificial Sequence
  Description of Artificial Sequence: Synthetic oligonucleotide
gcgccauugcacuccagccugggca

SEQ ID NO: 162879 - RNA, 25 nt, Artificial Sequence
  Description of Artificial Sequence: Synthetic oligonucleotide
aacagagaaaacaaaaaggaaaaca

SEQ ID NO: 162880 - RNA, 25 nt, Artificial Sequence
  Description of Artificial Sequence: Synthetic oligonucleotide
aaaugaugaaggucugcagaaacug

SEQ ID NO: 162881 - RNA, 25 nt, Artificial Sequence
  Description of Artificial Sequence: Synthetic oligonucleotide
gaaacccagacaugugucugccccc

SEQ ID NO: 162882 - RNA, 25 nt, Artificial Sequence
  Description of Artificial Sequence: Synthetic oligonucleotide
cucuaugugggcaugguuuugccag

SEQ ID NO: 162883 - RNA, 25 nt, Artificial Sequence
  Description of Artificial Sequence: Synthetic oligonucleotide
gugcuucuaagugcaggagaacaug

SEQ ID NO: 162884 - RNA, 25 nt, Artificial Sequence
  Description of Artificial Sequence: Synthetic oligonucleotide
gucaccugaggcuaguuuugcauuc

SEQ ID NO: 162885 - RNA, 25 nt, Artificial Sequence
  Description of Artificial Sequence: Synthetic oligonucleotide
caggucccuggcuucguuucuuguu

SEQ ID NO: 162886 - RNA, 25 nt, Artificial Sequence
  Description of Artificial Sequence: Synthetic oligonucleotide
ugguaugccuccccagaucguccuu

SEQ ID NO: 162887 - RNA, 25 nt, Artificial Sequence
  Description of Artificial Sequence: Synthetic oligonucleotide
uccuguauccaugugaccagacugu

SEQ ID NO: 162888 - RNA, 25 nt, Artificial Sequence
  Description of Artificial Sequence: Synthetic oligonucleotide
uauuuguugggacugucgcagaucu

SEQ ID NO: 162889 - RNA, 25 nt, Artificial Sequence
  Description of Artificial Sequence: Synthetic oligonucleotide
uuggcuucuuacaguucuuccuguc

SEQ ID NO: 162890 - RNA, 25 nt, Artificial Sequence
  Description of Artificial Sequence: Synthetic oligonucleotide
ccaaacuccauccugucccucagga

SEQ ID NO: 162891 - RNA, 25 nt, Artificial Sequence
  Description of Artificial Sequence: Synthetic oligonucleotide
aacggggggaaaauucuccgaaugu

SEQ ID NO: 162892 - RNA, 25 nt, Artificial Sequence
  Description of Artificial Sequence: Synthetic oligonucleotide
uuuuugguuuuuuggcugcuuggaa

SEQ ID NO: 162893 - RNA, 25 nt, Artificial Sequence
  Description of Artificial Sequence: Synthetic oligonucleotide
auuuacuucugccaccugcugguca

SEQ ID NO: 162894 - RNA, 25 nt, Artificial Sequence
  Description of Artificial Sequence: Synthetic oligonucleotide
aucacuguccucacuaaguggauuc

SEQ ID NO: 162895 - RNA, 25 nt, Artificial Sequence
  Description of Artificial Sequence: Synthetic oligonucleotide
cuggcucccccguaccucauggcuc

SEQ ID NO: 162896 - RNA, 25 nt, Artificial Sequence
  Description of Artificial Sequence: Synthetic oligonucleotide
caaacuaccacuccucagucgcuau

SEQ ID NO: 162897 - RNA, 25 nt, Artificial Sequence
  Description of Artificial Sequence: Synthetic oligonucleotide
uauuaaagcuuauauuuugcuggau

SEQ ID NO: 162898 - RNA, 25 nt, Artificial Sequence
  Description of Artificial Sequence: Synthetic oligonucleotide
uuacugcuaaauacaaaagaaaguu

SEQ ID NO: 162899 - RNA, 25 nt, Artificial Sequence
  Description of Artificial Sequence: Synthetic oligonucleotide
ucaauauguuuucauuucuguaggg

SEQ ID NO: 162900 - RNA, 25 nt, Artificial Sequence
  Description of Artificial Sequence: Synthetic oligonucleotide
gaaaaugggauugcugcuuuaaauu

SEQ ID NO: 162901 - RNA, 25 nt, Artificial Sequence
  Description of Artificial Sequence: Synthetic oligonucleotide
uucugagcuagggauuuuuuggcag

SEQ ID NO: 162902 - RNA, 25 nt, Artificial Sequence
  Description of Artificial Sequence: Synthetic oligonucleotide
gcugcaguguuggcgacuauuguaa

SEQ ID NO: 162903 - RNA, 25 nt, Artificial Sequence
  Description of Artificial Sequence: Synthetic oligonucleotide
aaauucucuuuguuucucucuguaa

SEQ ID NO: 162904 - RNA, 25 nt, Artificial Sequence
  Description of Artificial Sequence: Synthetic oligonucleotide
aauagcaccugcuaacauuacaauu

SEQ ID NO: 162905 - RNA, 25 nt, Artificial Sequence
  Description of Artificial Sequence: Synthetic oligonucleotide
uuguauuuauguuuaaagaaggcau

SEQ ID NO: 162906 - RNA, 25 nt, Artificial Sequence
  Description of Artificial Sequence: Synthetic oligonucleotide
ucauuuggugaacagaacuaggaaa

SEQ ID NO: 162907 - RNA, 25 nt, Artificial Sequence
  Description of Artificial Sequence: Synthetic oligonucleotide
augaauuuuuagcucuuaaaagcau

SEQ ID NO: 162908 - RNA, 25 nt, Artificial Sequence
  Description of Artificial Sequence: Synthetic oligonucleotide
uuugcuuugagaccgcacaggagug

SEQ ID NO: 162909 - RNA, 25 nt, Artificial Sequence
  Description of Artificial Sequence: Synthetic oligonucleotide
gucuuuccuuguaaaacagugauga

SEQ ID NO: 162910 - RNA, 25 nt, Artificial Sequence
  Description of Artificial Sequence: Synthetic oligonucleotide
auaauuucugccuuggcccuaccuu

SEQ ID NO: 162911 - RNA, 25 nt, Artificial Sequence
  Description of Artificial Sequence: Synthetic oligonucleotide
ugaagcaauguugugugaagggaug

SEQ ID NO: 162912 - RNA, 25 nt, Artificial Sequence
  Description of Artificial Sequence: Synthetic oligonucleotide
gaagaaucuaaaagucuucauaagu

SEQ ID NO: 162913 - RNA, 25 nt, Artificial Sequence
  Description of Artificial Sequence: Synthetic oligonucleotide
uccuugggagaggugcuagaaaaau

SEQ ID NO: 162914 - RNA, 25 nt, Artificial Sequence
  Description of Artificial Sequence: Synthetic oligonucleotide
uauaaggcacuaucauaauuacagu

SEQ ID NO: 162915 - RNA, 25 nt, Artificial Sequence
  Description of Artificial Sequence: Synthetic oligonucleotide
ugauguccuugcuguuacuacucaa

SEQ ID NO: 162916 - RNA, 25 nt, Artificial Sequence
  Description of Artificial Sequence: Synthetic oligonucleotide
aaucacccacaaauuuccccaaaga

SEQ ID NO: 162917 - RNA, 25 nt, Artificial Sequence
  Description of Artificial Sequence: Synthetic oligonucleotide
acugcgcuagcugucaaauaaaaga

SEQ ID NO: 162918 - RNA, 25 nt, Artificial Sequence
  Description of Artificial Sequence: Synthetic oligonucleotide
acagugaaauugaccugaaaaaaaa

SEQ ID NO: 162919 - RNA, 25 nt, Artificial Sequence
  Description of Artificial Sequence: Synthetic oligonucleotide
ccuuauguccagaucuugaagguaa

SEQ ID NO: 162920 - RNA, 25 nt, Artificial Sequence
  Description of Artificial Sequence: Synthetic oligonucleotide
aucauggcaccagucuucgugggcc

SEQ ID NO: 162921 - RNA, 25 nt, Artificial Sequence
  Description of Artificial Sequence: Synthetic oligonucleotide
cagucuacugggaaggagaccacug

SEQ ID NO: 162922 - RNA, 25 nt, Artificial Sequence
  Description of Artificial Sequence: Synthetic oligonucleotide
gucucgggggcucaaguuccugugg

SEQ ID NO: 162923 - RNA, 25 nt, Artificial Sequence
  Description of Artificial Sequence: Synthetic oligonucleotide
ggcaggcucaguugcccccgaaugg

SEQ ID NO: 162924 - RNA, 25 nt, Artificial Sequence
  Description of Artificial Sequence: Synthetic oligonucleotide
ggaucauuccucacgcuucaggcac

SEQ ID NO: 162925 - RNA, 25 nt, Artificial Sequence
  Description of Artificial Sequence: Synthetic oligonucleotide
cacacacuccaucucaguagggauc

SEQ ID NO: 162926 - RNA, 25 nt, Artificial Sequence
  Description of Artificial Sequence: Synthetic oligonucleotide
cuagccacaucccccaggacuagua

SEQ ID NO: 162927 - RNA, 25 nt, Artificial Sequence
  Description of Artificial Sequence: Synthetic oligonucleotide
aacagaggucacaaaguggagguga

SEQ ID NO: 162928 - RNA, 25 nt, Artificial Sequence
  Description of Artificial Sequence: Synthetic oligonucleotide
agcugggaacagagggcugcaggga

SEQ ID NO: 162929 - RNA, 25 nt, Artificial Sequence
  Description of Artificial Sequence: Synthetic oligonucleotide
auggguggugcuggucuguaauaag

SEQ ID NO: 162930 - RNA, 25 nt, Artificial Sequence
  Description of Artificial Sequence: Synthetic oligonucleotide
gcuuugagagcaacgucacuggggc

SEQ ID NO: 162931 - RNA, 25 nt, Artificial Sequence
  Description of Artificial Sequence: Synthetic oligonucleotide
cuuuggggucagcuacacaaggaag

SEQ ID NO: 162932 - RNA, 25 nt, Artificial Sequence
  Description of Artificial Sequence: Synthetic oligonucleotide
ggcauuuggaccccugccuuuucau

SEQ ID NO: 162933 - RNA, 25 nt, Artificial Sequence
  Description of Artificial Sequence: Synthetic oligonucleotide
uugcccgaaaccagagccuuuccac

SEQ ID NO: 162934 - RNA, 25 nt, Artificial Sequence
  Description of Artificial Sequence: Synthetic oligonucleotide
ccaagcguuucccagucuuagcccu

SEQ ID NO: 162935 - RNA, 25 nt, Artificial Sequence
  Description of Artificial Sequence: Synthetic oligonucleotide
uguguccugaguuacguacgaucuu

SEQ ID NO: 162936 - RNA, 25 nt, Artificial Sequence
  Description of Artificial Sequence: Synthetic oligonucleotide
uucuggcaaauggggugcaugauaa

SEQ ID NO: 162937 - RNA, 25 nt, Artificial Sequence
  Description of Artificial Sequence: Synthetic oligonucleotide
agagcaucucuuacgaagaguugga

SEQ ID NO: 162938 - RNA, 25 nt, Artificial Sequence
  Description of Artificial Sequence: Synthetic oligonucleotide
aaaaacaaaugccauauauaaauuc

SEQ ID NO: 162939 - RNA, 25 nt, Artificial Sequence
  Description of Artificial Sequence: Synthetic oligonucleotide
cuaagccauaugaggacgaggagua

SEQ ID NO: 162940 - RNA, 25 nt, Artificial Sequence
  Description of Artificial Sequence: Synthetic oligonucleotide
aauggcauuuucuuccuuuuuccuc

SEQ ID NO: 162941 - RNA, 25 nt, Artificial Sequence
  Description of Artificial Sequence: Synthetic oligonucleotide
cucacucccagacauucauuguccc

SEQ ID NO: 162942 - RNA, 25 nt, Artificial Sequence
  Description of Artificial Sequence: Synthetic oligonucleotide
cugaaugcuccauuaauccagggaa

SEQ ID NO: 162943 - RNA, 25 nt, Artificial Sequence
  Description of Artificial Sequence: Synthetic oligonucleotide
agguaauugccuaaaucuccagugg

SEQ ID NO: 162944 - RNA, 25 nt, Artificial Sequence
  Description of Artificial Sequence: Synthetic oligonucleotide
gaucucgcaacaggaaggaaccaga

SEQ ID NO: 162945 - RNA, 25 nt, Artificial Sequence
  Description of Artificial Sequence: Synthetic oligonucleotide
aagcugggaaaguuguuuaccucuu

SEQ ID NO: 162946 - RNA, 25 nt, Artificial Sequence
  Description of Artificial Sequence: Synthetic oligonucleotide
uugucccagaguuagaccucauccu

SEQ ID NO: 162947 - RNA, 25 nt, Artificial Sequence
  Description of Artificial Sequence: Synthetic oligonucleotide
uccccuagcuuagcugucucagaga

SEQ ID NO: 162948 - RNA, 25 nt, Artificial Sequence
  Description of Artificial Sequence: Synthetic oligonucleotide
auauacuggcccucccuucucuucu

SEQ ID NO: 162949 - RNA, 25 nt, Artificial Sequence
  Description of Artificial Sequence: Synthetic oligonucleotide
ucuuugcugcuggugcuaaaacugc

SEQ ID NO: 162950 - RNA, 25 nt, Artificial Sequence
  Description of Artificial Sequence: Synthetic oligonucleotide
cucuguaggucauuggccacugucu

SEQ ID NO: 162951 - RNA, 25 nt, Artificial Sequence
  Description of Artificial Sequence: Synthetic oligonucleotide
uccacucacaaccccugcuccaguc

SEQ ID NO: 162952 - RNA, 25 nt, Artificial Sequence
  Description of Artificial Sequence: Synthetic oligonucleotide
ccuggagggaguggguuaaacacaa

SEQ ID NO: 162953 - RNA, 25 nt, Artificial Sequence
  Description of Artificial Sequence: Synthetic oligonucleotide
aauagaacauuccauuugaagcagu

SEQ ID NO: 162954 - RNA, 25 nt, Artificial Sequence
  Description of Artificial Sequence: Synthetic oligonucleotide
uuuaaucaaaugcuuuggacuuuug

SEQ ID NO: 162955 - RNA, 25 nt, Artificial Sequence
  Description of Artificial Sequence: Synthetic oligonucleotide
gaaguccacuuguucuguacuugua

SEQ ID NO: 162956 - RNA, 25 nt, Artificial Sequence
  Description of Artificial Sequence: Synthetic oligonucleotide
aaaagggaaagaaggccgggcgcag

SEQ ID NO: 162957 - RNA, 25 nt, Artificial Sequence
  Description of Artificial Sequence: Synthetic oligonucleotide
guggcucacgccuguaaucccagca

SEQ ID NO: 162958 - RNA, 25 nt, Artificial Sequence
  Description of Artificial Sequence: Synthetic oligonucleotide
acuuuagaucacuugaggucaggag

SEQ ID NO: 162959 - RNA, 25 nt, Artificial Sequence
  Description of Artificial Sequence: Synthetic oligonucleotide
guuugagaccagcccggccaacaug

SEQ ID NO: 162960 - RNA, 25 nt, Artificial Sequence
  Description of Artificial Sequence: Synthetic oligonucleotide
ggugaaaccccaucucuacuaaaaa

SEQ ID NO: 162961 - RNA, 25 nt, Artificial Sequence
  Description of Artificial Sequence: Synthetic oligonucleotide
auacaaaaauuagcugugcauagug

SEQ ID NO: 162962 - RNA, 25 nt, Artificial Sequence
  Description of Artificial Sequence: Synthetic oligonucleotide
gguuggcaccuguagucccagcuac

SEQ ID NO: 162963 - RNA, 25 nt, Artificial Sequence
  Description of Artificial Sequence: Synthetic oligonucleotide
cucaggaggcugaggcaagcuaacu

SEQ ID NO: 162964 - RNA, 25 nt, Artificial Sequence
  Description of Artificial Sequence: Synthetic oligonucleotide
ugcuugaacccagaaggcagagguu

SEQ ID NO: 162965 - RNA, 25 nt, Artificial Sequence
  Description of Artificial Sequence: Synthetic oligonucleotide
ugcagugagcugagaucacgccacu

SEQ ID NO: 162966 - RNA, 25 nt, Artificial Sequence
  Description of Artificial Sequence: Synthetic oligonucleotide
ugcacuccagccugggugacagagu

SEQ ID NO: 162967 - RNA, 25 nt, Artificial Sequence
  Description of Artificial Sequence: Synthetic oligonucleotide
ugagugagacucugcguuaaaaaaa

SEQ ID NO: 162968 - RNA, 25 nt, Artificial Sequence
  Description of Artificial Sequence: Synthetic oligonucleotide
aagguaaucauggcaccagucuucg

SEQ ID NO: 162969 - RNA, 25 nt, Artificial Sequence
  Description of Artificial Sequence: Synthetic oligonucleotide
gugggccagucuacugggaaggaga

SEQ ID NO: 162970 - RNA, 25 nt, Artificial Sequence
  Description of Artificial Sequence: Synthetic oligonucleotide
accacugucucgggggcucaaguuc

SEQ ID NO: 162971 - RNA, 25 nt, Artificial Sequence
  Description of Artificial Sequence: Synthetic oligonucleotide
ccugugggcaggcucaguugccccc

SEQ ID NO: 162972 - RNA, 25 nt, Artificial Sequence
  Description of Artificial Sequence: Synthetic oligonucleotide
cgaaugggaucauuccucacgcuuc

SEQ ID NO: 162973 - RNA, 25 nt, Artificial Sequence
  Description of Artificial Sequence: Synthetic oligonucleotide
caggcacacacacuccaucucagua

SEQ ID NO: 162974 - RNA, 25 nt, Artificial Sequence
  Description of Artificial Sequence: Synthetic oligonucleotide
agggaucuagccacaucccccagga

SEQ ID NO: 162975 - RNA, 25 nt, Artificial Sequence
  Description of Artificial Sequence: Synthetic oligonucleotide
acuaguaacagaggucacaaagugg

SEQ ID NO: 162976 - RNA, 25 nt, Artificial Sequence
  Description of Artificial Sequence: Synthetic oligonucleotide
gaggugagcugggaacagagggcug

SEQ ID NO: 162977 - RNA, 25 nt, Artificial Sequence
  Description of Artificial Sequence: Synthetic oligonucleotide
gcagggauggguggugcuggucugu

SEQ ID NO: 162978 - RNA, 25 nt, Artificial Sequence
  Description of Artificial Sequence: Synthetic oligonucleotide
uaauaagcuuugagagcaacgucac

SEQ ID NO: 162979 - RNA, 25 nt, Artificial Sequence
  Description of Artificial Sequence: Synthetic oligonucleotide
cuggggcuuuggggucagcuacaca

SEQ ID NO: 162980 - RNA, 25 nt, Artificial Sequence
  Description of Artificial Sequence: Synthetic oligonucleotide
aaggaaggcauuuggaccccugccu

SEQ ID NO: 162981 - RNA, 25 nt, Artificial Sequence
  Description of Artificial Sequence: Synthetic oligonucleotide
uuuucauugcccgaaaccagagccu

SEQ ID NO: 162982 - RNA, 25 nt, Artificial Sequence
  Description of Artificial Sequence: Synthetic oligonucleotide
uuuccaccaagcguuucccagucuu

SEQ ID NO: 162983 - RNA, 25 nt, Artificial Sequence
  Description of Artificial Sequence: Synthetic oligonucleotide
uagcccuguguccugaguuacguac

SEQ ID NO: 162984 - RNA, 25 nt, Artificial Sequence
  Description of Artificial Sequence: Synthetic oligonucleotide
cgaucuuucuggcaaauggggugca

SEQ ID NO: 162985 - RNA, 25 nt, Artificial Sequence
  Description of Artificial Sequence: Synthetic oligonucleotide
augauaagagcaucucuuacgaaga

SEQ ID NO: 162986 - RNA, 25 nt, Artificial Sequence
  Description of Artificial Sequence: Synthetic oligonucleotide
aguuggaaaaacaaaugccauauau

SEQ ID NO: 162987 - RNA, 25 nt, Artificial Sequence
  Description of Artificial Sequence: Synthetic oligonucleotide
uaaauucuaagccauaugaggacga

SEQ ID NO: 162988 - RNA, 25 nt, Artificial Sequence
  Description of Artificial Sequence: Synthetic oligonucleotide
aggaguaauggcauuuucuuccuuu

SEQ ID NO: 162989 - RNA, 25 nt, Artificial Sequence
  Description of Artificial Sequence: Synthetic oligonucleotide
uuuccucucacucccagacauucau

SEQ ID NO: 162990 - RNA, 25 nt, Artificial Sequence
  Description of Artificial Sequence: Synthetic oligonucleotide
uugucccugaaugcuccauuaaucc

SEQ ID NO: 162991 - RNA, 25 nt, Artificial Sequence
  Description of Artificial Sequence: Synthetic oligonucleotide
cagggaagguaauugccuaaaucuc

SEQ ID NO: 162992 - RNA, 25 nt, Artificial Sequence
  Description of Artificial Sequence: Synthetic oligonucleotide
ccaguggaucucgcaacaggaagga

SEQ ID NO: 162993 - RNA, 25 nt, Artificial Sequence
  Description of Artificial Sequence: Synthetic oligonucleotide
aaccagaagcugggaaaguuguuua

SEQ ID NO: 162994 - RNA, 25 nt, Artificial Sequence
  Description of Artificial Sequence: Synthetic oligonucleotide
accucuuugucccagaguuagaccu

SEQ ID NO: 162995 - RNA, 25 nt, Artificial Sequence
  Description of Artificial Sequence: Synthetic oligonucleotide
ucauccuccccuagcuuagcugucu

SEQ ID NO: 162996 - RNA, 25 nt, Artificial Sequence
  Description of Artificial Sequence: Synthetic oligonucleotide
ucagagauauacuggcccucccuuc

SEQ ID NO: 162997 - RNA, 25 nt, Artificial Sequence
  Description of Artificial Sequence: Synthetic oligonucleotide
cucuucucuuugcugcuggugcuaa

SEQ ID NO: 162998 - RNA, 25 nt, Artificial Sequence
  Description of Artificial Sequence: Synthetic oligonucleotide
aaacugcucuguaggucauuggcca

SEQ ID NO: 162999 - RNA, 25 nt, Artificial Sequence
  Description of Artificial Sequence: Synthetic oligonucleotide
acugucuccacucacaaccccugcu

SEQ ID NO: 163000 - RNA, 25 nt, Artificial Sequence
  Description of Artificial Sequence: Synthetic oligonucleotide
uccaguccuggagggaguggguuaa

SEQ ID NO: 163001 - RNA, 25 nt, Artificial Sequence
  Description of Artificial Sequence: Synthetic oligonucleotide
aacacaaauagaacauuccauuuga

SEQ ID NO: 163002 - RNA, 25 nt, Artificial Sequence
  Description of Artificial Sequence: Synthetic oligonucleotide
uuuuuuuuuaaucaaaugcuuugga

SEQ ID NO: 163003 - RNA, 25 nt, Artificial Sequence
  Description of Artificial Sequence: Synthetic oligonucleotide
acuuuugaaguccacuuguucugua

SEQ ID NO: 163004 - RNA, 25 nt, Artificial Sequence
  Description of Artificial Sequence: Synthetic oligonucleotide
acuuguaaaagggaaagaaggccgg

SEQ ID NO: 163005 - RNA, 25 nt, Artificial Sequence
  Description of Artificial Sequence: Synthetic oligonucleotide
ggcgcaguggcucacgccuguaauc

SEQ ID NO: 163006 - RNA, 25 nt, Artificial Sequence
  Description of Artificial Sequence: Synthetic oligonucleotide
cccagcacuuuagaucacuugaggu

SEQ ID NO: 163007 - RNA, 25 nt, Artificial Sequence
  Description of Artificial Sequence: Synthetic oligonucleotide
ucaggaguuugagaccagcccggcc

SEQ ID NO: 163008 - RNA, 25 nt, Artificial Sequence
  Description of Artificial Sequence: Synthetic oligonucleotide
caacauggugaaaccccaucucuac

SEQ ID NO: 163009 - RNA, 25 nt, Artificial Sequence
  Description of Artificial Sequence: Synthetic oligonucleotide
cuaaaaauacaaaaauuagcugugc

SEQ ID NO: 163010 - RNA, 25 nt, Artificial Sequence
  Description of Artificial Sequence: Synthetic oligonucleotide
cauagugguuggcaccuguaguccc

SEQ ID NO: 163011 - RNA, 25 nt, Artificial Sequence
  Description of Artificial Sequence: Synthetic oligonucleotide
cagcuacucaggaggcugaggcaag

SEQ ID NO: 163012 - RNA, 25 nt, Artificial Sequence
  Description of Artificial Sequence: Synthetic oligonucleotide
gcuaacugcuugaacccagaaggca

SEQ ID NO: 163013 - RNA, 25 nt, Artificial Sequence
  Description of Artificial Sequence: Synthetic oligonucleotide
agagguugcagugagcugagaucac

SEQ ID NO: 163014 - RNA, 25 nt, Artificial Sequence
  Description of Artificial Sequence: Synthetic oligonucleotide
cgccacugcacuccagccuggguga

SEQ ID NO: 163015 - RNA, 25 nt, Artificial Sequence
  Description of Artificial Sequence: Synthetic oligonucleotide
acagagugagugagacucugcguua

SEQ ID NO: 163016 - RNA, 4647 nt, Homo sapiens
ggcggcggcuggaggagagcgcgguggagagccgagcgggcgggcggcgggugcggagcgggcgagggagcgcgcgcggccgccacaaagcucgggcgccgcggggcugcaugcggcguaccuggcccggcgcggcgacugcucuccgggcuggcgggggccggccgcgagccccgggggccccgaggccgcagcuugccugcgcgcucugagccuucgcaacucgcgagcaaaguuugguggaggcaacgccaagccugaguccuuucuuccucucguuccccaaauccgagggcagcccgcgggcgucaugcccgcgcuccuccgcagccugggguacgcgugaagcccgggaggcuuggcgccggcgaagacccaaggaccacucuucugcguuuggaguugcuccccgcaaccccgggcucgucgcuuucuccaucccgacccacgcggggcgcggggacaacacaggucgcggaggagcguugccauucaagugacugcagcagcagcggcagcgccucgguuccugagcccaccgcaggcugaaggcauugcgcguaguccaugcccguagaggaagugugcagaugggauuaacguccacauggagauauggaagaggaccggggauugguaccguaaccauggucagcuggggucguuucaucugccuggucguggucaccauggcaaccuugucccuggcccggcccuccuucaguuuaguugaggauaccacauuagagccagaagagccaccaaccaaauaccaaaucucucaaccagaaguguacguggcugcgccaggggagucgcuagaggugcgcugccuguugaaagaugccgccgugaucaguuggacuaaggauggggugcacuuggggcccaacaauaggacagugcuuauuggggaguacuugcagauaaagggcgccacgccuagagacuccggccucuaugcuuguacugccaguaggacuguagacagugaaacuugguacuucauggugaaugucacagaugccaucucauccggagaugaugaggaugacaccgauggugcggaagauuuugucagugagaacaguaacaacaagagagcaccauacuggaccaacacagaaaagauggaaaagcggcuccaugcugugccugcggccaacacugucaaguuucgcugcccagccggggggaacccaaugccaaccaugcgguggcugaaaaacgggaaggaguuuaagcaggagcaucgcauuggaggcuacaagguacgaaaccagcacuggagccucauuauggaaaguguggucccaucugacaagggaaauuauaccuguguaguggagaaugaauacggguccaucaaucacacguaccaccuggauguuguggagcgaucgccucaccggcccauccuccaagccggacugccggcaaaugccuccacaguggucggaggagacguagaguuugucugcaagguuuacagugaugcccagccccacauccaguggaucaagcacguggaaaagaacggcaguaaauacgggcccgacgggcugcccuaccucaagguucucaagcacucggggauaaauaguuccaaugcagaagugcuggcucuguucaaugugaccgaggcggaugcuggggaauauauauguaaggucuccaauuauauagggcaggccaaccagucugccuggcucacuguccugccaaaacagcaagcgccuggaagagaaaaggagauuacagcuuccccagacuaccuggagauagccauuuacugcauaggggucuucuuaaucgccuguauggugguaacagucauccugugccgaaugaagaacacgaccaagaagccagacuucagcagccagccggcugugcacaagcugaccaaacguaucccccugcggagacagguaacaguuucggcugaguccagcuccuccaugaacuccaacaccccgcuggugaggauaacaacacgccucucuucaacggcagacacccccaugcuggcaggggucuccgaguaugaacuuccagaggacccaaaaugggaguuuccaagagauaagcugacacugggcaagccccugggagaagguugcuuugggcaaguggucauggcggaagcagugggaauugacaaagacaagcccaaggaggcggucaccguggccgugaagauguugaaagaugaugccacagagaaagaccuuucugaucuggugucagagauggagaugaugaagaugauugggaaacacaagaauaucauaaaucuucuuggagccugcacacaggaugggccucucuaugucauaguugaguaugccucuaaaggcaaccuccgagaauaccuccgagcccggaggccacccgggauggaguacuccuaugacauuaaccguguuccugaggagcagaugaccuucaaggacuuggugucaugcaccuaccagcuggccagaggcauggaguacuuggcuucccaaaaauguauucaucgagauuuagcagccagaaauguuuugguaacagaaaacaaugugaugaaaauagcagacuuuggacucgccagagauaucaacaauauagacuauuacaaaaagaccaccaaugggcggcuuccagucaaguggauggcuccagaagcccuguuugauagaguauacacucaucagagugaugucugguccuucgggguguuaaugugggagaucuucacuuuagggggcucgcccuacccagggauucccguggaggaacuuuuuaagcugcugaaggaaggacacagaauggauaagccagccaacugcaccaacgaacuguacaugaugaugagggacuguuggcaugcagugcccucccagagaccaacguucaagcaguugguagaagacuuggaucgaauucucacucucacaaccaaugaggaauacuuggaccucagccaaccucucgaacaguauucaccuaguuacccugacacaagaaguucuuguucuucaggagaugauucuguuuuuucuccagaccccaugccuuacgaaccaugccuuccucaguauccacacauaaacggcaguguuaaaacaugaaugacugugucugccuguccccaaacaggacagcacugggaaccuagcuacacugagcagggagaccaugccucccagagcuuguugucuccacuuguauauauggaucagaggaguaaauaauuggaaaaguaaucagcauauguguaaagauuuauacaguugaaaacuuguaaucuuccccaggaggagaagaagguuucuggagcaguggacugccacaagccaccauguaaccccucucaccugccgugcguacuggcuguggaccaguaggacucaagguggacgugcguucugccuuccuuguuaauuuuguaauaauuggagaagauuuaugucagcacacacuuacagagcacaaaugcaguauauaggugcuggauguauguaaauauauucaaauuauguauaaauauauauuauauauuuacaaggaguuauuuuuuguauugauuuuaaauggaugucccaaugcaccuagaaaauuggucucucuuuuuuuaauagcuauuugcuaaaugcuguucuuacacauaauuucuuaauuuucaccgagcagagguggaaaaauacuuuugcuuucagggaaaaugguauaacguuaauuuauuaauaaauugguaauauacaaaacaauuaaucauuuauaguuuuuuuuguaauuuaaguggcauuucuaugcaggcagcacagcagacuaguuaaucuauugcuuggacuuaacuaguuaucagauccuuugaaaagagaauauuuacaauauaugacuaauuuggggaaaaugaaguuuugauuuauuuguguuuaaaugcugcugucagacgauuguucuuagaccuccuaaaugccccauauuaaaagaacucauucauaggaagguguuucauuuuggugugcaacccugucauuacgucaacgcaacgucuaacuggacuucccaagauaaaugguaccagcguccucuuaaaagaugccuuaauccauuccuugaggacagaccuuaguugaaaugauagcagaaugugcuucucucuggcagcuggccuucugcuucugaguugcacauuaaucagauuagccuguauucucuucagugaauuuugauaauggcuuccagacucuuuggcguuggagacgccuguuaggaucuucaagucccaucauagaaaauugaaacacagaguuguucugcugauaguuuuggggauacguccaucuuuuuaagggauugcuuucaucuaauucuggcaggaccucaccaaaagauccagccucauaccuacaucagacaaaauaucgccguuguuccuucuguacuaaaguauuguguuuugcuuuggaaacacccacucacuuugcaauagccgugcaagaugaaugcagauuacacugaucuuauguguuacaaaauuggagaaaguauuuaauaaaaccuguuaauuuuuauacugacaauaaaaauguuucuacagauauuaauguuaacaagacaaaauaaaugucacgcaacuuaaaaaaaaaaaaaaaa

SEQ ID NO: 163017 - RNA, 4644 nt, Homo sapiens
ggcggcggcuggaggagagcgcgguggagagccgagcgggcgggcggcgggugcggagcgggcgagggagcgcgcgcggccgccacaaagcucgggcgccgcggggcugcaugcggcguaccuggcccggcgcggcgacugcucuccgggcuggcgggggccggccgcgagccccgggggccccgaggccgcagcuugccugcgcgcucugagccuucgcaacucgcgagcaaaguuugguggaggcaacgccaagccugaguccuuucuuccucucguuccccaaauccgagggcagcccgcgggcgucaugcccgcgcuccuccgcagccugggguacgcgugaagcccgggaggcuuggcgccggcgaagacccaaggaccacucuucugcguuuggaguugcuccccgcaaccccgggcucgucgcuuucuccaucccgacccacgcggggcgcggggacaacacaggucgcggaggagcguugccauucaagugacugcagcagcagcggcagcgccucgguuccugagcccaccgcaggcugaaggcauugcgcguaguccaugcccguagaggaagugugcagaugggauuaacguccacauggagauauggaagaggaccggggauugguaccguaaccauggucagcuggggucguuucaucugccuggucguggucaccauggcaaccuugucccuggcccggcccuccuucaguuuaguugaggauaccacauuagagccagaagagccaccaaccaaauaccaaaucucucaaccagaaguguacguggcugcgccaggggagucgcuagaggugcgcugccuguugaaagaugccgccgugaucaguuggacuaaggauggggugcacuuggggcccaacaauaggacagugcuuauuggggaguacuugcagauaaagggcgccacgccuagagacuccggccucuaugcuuguacugccaguaggacuguagacagugaaacuugguacuucauggugaaugucacagaugccaucucauccggagaugaugaggaugacaccgauggugcggaagauuuugucagugagaacaguaacaacaagagagcaccauacuggaccaacacagaaaagauggaaaagcggcuccaugcugugccugcggccaacacugucaaguuucgcugcccagccggggggaacccaaugccaaccaugcgguggcugaaaaacgggaaggaguuuaagcaggagcaucgcauuggaggcuacaagguacgaaaccagcacuggagccucauuauggaaaguguggucccaucugacaagggaaauuauaccuguguaguggagaaugaauacggguccaucaaucacacguaccaccuggauguuguggagcgaucgccucaccggcccauccuccaagccggacugccggcaaaugccuccacaguggucggaggagacguagaguuugucugcaagguuuacagugaugcccagccccacauccaguggaucaagcacguggaaaagaacggcaguaaauacgggcccgacgggcugcccuaccucaagguucucaaggccgccgguguuaacaccacggacaaagagauugagguucucuauauucggaauguaacuuuugaggacgcuggggaauauacgugcuuggcggguaauucuauugggauauccuuucacucugcaugguugacaguucugccagcgccuggaagagaaaaggagauuacagcuuccccagacuaccuggagauagccauuuacugcauaggggucuucuuaaucgccuguauggugguaacagucauccugugccgaaugaagaacacgaccaagaagccagacuucagcagccagccggcugugcacaagcugaccaaacguaucccccugcggagacagguaacaguuucggcugaguccagcuccuccaugaacuccaacaccccgcuggugaggauaacaacacgccucucuucaacggcagacacccccaugcuggcaggggucuccgaguaugaacuuccagaggacccaaaaugggaguuuccaagagauaagcugacacugggcaagccccugggagaagguugcuuugggcaaguggucauggcggaagcagugggaauugacaaagacaagcccaaggaggcggucaccguggccgugaagauguugaaagaugaugccacagagaaagaccuuucugaucuggugucagagauggagaugaugaagaugauugggaaacacaagaauaucauaaaucuucuuggagccugcacacaggaugggccucucuaugucauaguugaguaugccucuaaaggcaaccuccgagaauaccuccgagcccggaggccacccgggauggaguacuccuaugacauuaaccguguuccugaggagcagaugaccuucaaggacuuggugucaugcaccuaccagcuggccagaggcauggaguacuuggcuucccaaaaauguauucaucgagauuuagcagccagaaauguuuugguaacagaaaacaaugugaugaaaauagcagacuuuggacucgccagagauaucaacaauauagacuauuacaaaaagaccaccaaugggcggcuuccagucaaguggauggcuccagaagcccuguuugauagaguauacacucaucagagugaugucugguccuucgggguguuaaugugggagaucuucacuuuagggggcucgcccuacccagggauucccguggaggaacuuuuuaagcugcugaaggaaggacacagaauggauaagccagccaacugcaccaacgaacuguacaugaugaugagggacuguuggcaugcagugcccucccagagaccaacguucaagcaguugguagaagacuuggaucgaauucucacucucacaaccaaugaggaauacuuggaccucagccaaccucucgaacaguauucaccuaguuacccugacacaagaaguucuuguucuucaggagaugauucuguuuuuucuccagaccccaugccuuacgaaccaugccuuccucaguauccacacauaaacggcaguguuaaaacaugaaugacugugucugccuguccccaaacaggacagcacugggaaccuagcuacacugagcagggagaccaugccucccagagcuuguugucuccacuuguauauauggaucagaggaguaaauaauuggaaaaguaaucagcauauguguaaagauuuauacaguugaaaacuuguaaucuuccccaggaggagaagaagguuucuggagcaguggacugccacaagccaccauguaaccccucucaccugccgugcguacuggcuguggaccaguaggacucaagguggacgugcguucugccuuccuuguuaauuuuguaauaauuggagaagauuuaugucagcacacacuuacagagcacaaaugcaguauauaggugcuggauguauguaaauauauucaaauuauguauaaauauauauuauauauuuacaaggaguuauuuuuuguauugauuuuaaauggaugucccaaugcaccuagaaaauuggucucucuuuuuuuaauagcuauuugcuaaaugcuguucuuacacauaauuucuuaauuuucaccgagcagagguggaaaaauacuuuugcuuucagggaaaaugguauaacguuaauuuauuaauaaauugguaauauacaaaacaauuaaucauuuauaguuuuuuuuguaauuuaaguggcauuucuaugcaggcagcacagcagacuaguuaaucuauugcuuggacuuaacuaguuaucagauccuuugaaaagagaauauuuacaauauaugacuaauuuggggaaaaugaaguuuugauuuauuuguguuuaaaugcugcugucagacgauuguucuuagaccuccuaaaugccccauauuaaaagaacucauucauaggaagguguuucauuuuggugugcaacccugucauuacgucaacgcaacgucuaacuggacuucccaagauaaaugguaccagcguccucuuaaaagaugccuuaauccauuccuugaggacagaccuuaguugaaaugauagcagaaugugcuucucucuggcagcuggccuucugcuucugaguugcacauuaaucagauuagccuguauucucuucagugaauuuugauaauggcuuccagacucuuuggcguuggagacgccuguuaggaucuucaagucccaucauagaaaauugaaacacagaguuguucugcugauaguuuuggggauacguccaucuuuuuaagggauugcuuucaucuaauucuggcaggaccucaccaaaagauccagccucauaccuacaucagacaaaauaucgccguuguuccuucuguacuaaaguauuguguuuugcuuuggaaacacccacucacuuugcaauagccgugcaagaugaaugcagauuacacugaucuuauguguuacaaaauuggagaaaguauuuaauaaaaccuguuaauuuuuauacugacaauaaaaauguuucuacagauauuaauguuaacaagacaaaauaaaugucacgcaacuuaaaaaaaaaaaaaaaa

SEQ ID NO: 163018 - RNA, 19 nt, Artificial Sequence
  Description of Artificial Sequence: Synthetic oligonucleotide
ggcggcggcuggaggagag

SEQ ID NO: 163019 - RNA, 19 nt, Artificial Sequence
  Description of Artificial Sequence: Synthetic oligonucleotide
gcgcgguggagagccgagc

SEQ ID NO: 163020 - RNA, 19 nt, Artificial Sequence
  Description of Artificial Sequence: Synthetic oligonucleotide
cgggcgggcggcgggugcg

SEQ ID NO: 163021 - RNA, 19 nt, Artificial Sequence
  Description of Artificial Sequence: Synthetic oligonucleotide
ggagcgggcgagggagcgc

SEQ ID NO: 163022 - RNA, 19 nt, Artificial Sequence
  Description of Artificial Sequence: Synthetic oligonucleotide
cgcgcggccgccacaaagc

SEQ ID NO: 163023 - RNA, 19 nt, Artificial Sequence
  Description of Artificial Sequence: Synthetic oligonucleotide
cucgggcgccgcggggcug

SEQ ID NO: 163024 - RNA, 19 nt, Artificial Sequence
  Description of Artificial Sequence: Synthetic oligonucleotide
gcaugcggcguaccuggcc

SEQ ID NO: 163025 - RNA, 19 nt, Artificial Sequence
  Description of Artificial Sequence: Synthetic oligonucleotide
ccggcgcggcgacugcucu

SEQ ID NO: 163026 - RNA, 19 nt, Artificial Sequence
  Description of Artificial Sequence: Synthetic oligonucleotide
uccgggcuggcgggggccg

SEQ ID NO: 163027 - RNA, 19 nt, Artificial Sequence
  Description of Artificial Sequence: Synthetic oligonucleotide
ggccgcgagccccgggggc

SEQ ID NO: 163028 - RNA, 19 nt, Artificial Sequence
  Description of Artificial Sequence: Synthetic oligonucleotide
ccccgaggccgcagcuugc

SEQ ID NO: 163029 - RNA, 19 nt, Artificial Sequence
  Description of Artificial Sequence: Synthetic oligonucleotide
ccugcgcgcucugagccuu

SEQ ID NO: 163030 - RNA, 19 nt, Artificial Sequence
  Description of Artificial Sequence: Synthetic oligonucleotide
ucgcaacucgcgagcaaag

SEQ ID NO: 163031 - RNA, 19 nt, Artificial Sequence
  Description of Artificial Sequence: Synthetic oligonucleotide
guuugguggaggcaacgcc

SEQ ID NO: 163032 - RNA, 19 nt, Artificial Sequence
  Description of Artificial Sequence: Synthetic oligonucleotide
caagccugaguccuuucuu

SEQ ID NO: 163033 - RNA, 19 nt, Artificial Sequence
  Description of Artificial Sequence: Synthetic oligonucleotide
uccucucguuccccaaauc

SEQ ID NO: 163034 - RNA, 19 nt, Artificial Sequence
  Description of Artificial Sequence: Synthetic oligonucleotide
ccgagggcagcccgcgggc

SEQ ID NO: 163035 - RNA, 19 nt, Artificial Sequence
  Description of Artificial Sequence: Synthetic oligonucleotide
cgucaugcccgcgcuccuc

SEQ ID NO: 163036 - RNA, 19 nt, Artificial Sequence
  Description of Artificial Sequence: Synthetic oligonucleotide
ccgcagccugggguacgcg

SEQ ID NO: 163037 - RNA, 19 nt, Artificial Sequence
  Description of Artificial Sequence: Synthetic oligonucleotide
gugaagcccgggaggcuug

SEQ ID NO: 163038 - RNA, 19 nt, Artificial Sequence
  Description of Artificial Sequence: Synthetic oligonucleotide
ggcgccggcgaagacccaa

SEQ ID NO: 163039 - RNA, 19 nt, Artificial Sequence
  Description of Artificial Sequence: Synthetic oligonucleotide
aggaccacucuucugcguu

SEQ ID NO: 163040 - RNA, 19 nt, Artificial Sequence
  Description of Artificial Sequence: Synthetic oligonucleotide
uuggaguugcuccccgcaa

SEQ ID NO: 163041 - RNA, 19 nt, Artificial Sequence
  Description of Artificial Sequence: Synthetic oligonucleotide
accccgggcucgucgcuuu

SEQ ID NO: 163042 - RNA, 19 nt, Artificial Sequence
  Description of Artificial Sequence: Synthetic oligonucleotide
ucuccaucccgacccacgc

SEQ ID NO: 163043 - RNA, 19 nt, Artificial Sequence
  Description of Artificial Sequence: Synthetic oligonucleotide
cggggcgcggggacaacac

SEQ ID NO: 163044 - RNA, 19 nt, Artificial Sequence
  Description of Artificial Sequence: Synthetic oligonucleotide
caggucgcggaggagcguu

SEQ ID NO: 163045 - RNA, 19 nt, Artificial Sequence
  Description of Artificial Sequence: Synthetic oligonucleotide
ugccauucaagugacugca

SEQ ID NO: 163046 - RNA, 19 nt, Artificial Sequence
  Description of Artificial Sequence: Synthetic oligonucleotide
agcagcagcggcagcgccu

SEQ ID NO: 163047 - RNA, 19 nt, Artificial Sequence
  Description of Artificial Sequence: Synthetic oligonucleotide
ucgguuccugagcccaccg

SEQ ID NO: 163048 - RNA, 19 nt, Artificial Sequence
  Description of Artificial Sequence: Synthetic oligonucleotide
gcaggcugaaggcauugcg

SEQ ID NO: 163049 - RNA, 19 nt, Artificial Sequence
  Description of Artificial Sequence: Synthetic oligonucleotide
gcguaguccaugcccguag

SEQ ID NO: 163050 - RNA, 19 nt, Artificial Sequence
  Description of Artificial Sequence: Synthetic oligonucleotide
gaggaagugugcagauggg

SEQ ID NO: 163051 - RNA, 19 nt, Artificial Sequence
  Description of Artificial Sequence: Synthetic oligonucleotide
gauuaacguccacauggag

SEQ ID NO: 163052 - RNA, 19 nt, Artificial Sequence
  Description of Artificial Sequence: Synthetic oligonucleotide
gauauggaagaggaccggg

SEQ ID NO: 163053 - RNA, 19 nt, Artificial Sequence
  Description of Artificial Sequence: Synthetic oligonucleotide
ggauugguaccguaaccau

SEQ ID NO: 163054 - RNA, 19 nt, Artificial Sequence
  Description of Artificial Sequence: Synthetic oligonucleotide
uggucagcuggggucguuu

SEQ ID NO: 163055 - RNA, 19 nt, Artificial Sequence
  Description of Artificial Sequence: Synthetic oligonucleotide
ucaucugccuggucguggu

SEQ ID NO: 163056 - RNA, 19 nt, Artificial Sequence
  Description of Artificial Sequence: Synthetic oligonucleotide
ucaccauggcaaccuuguc

SEQ ID NO: 163057 - RNA, 19 nt, Artificial Sequence
  Description of Artificial Sequence: Synthetic oligonucleotide
cccuggcccggcccuccuu

SEQ ID NO: 163058 - RNA, 19 nt, Artificial Sequence
  Description of Artificial Sequence: Synthetic oligonucleotide
ucaguuuaguugaggauac

SEQ ID NO: 163059 - RNA, 19 nt, Artificial Sequence
  Description of Artificial Sequence: Synthetic oligonucleotide
ccacauuagagccagaaga

SEQ ID NO: 163060 - RNA, 19 nt, Artificial Sequence
  Description of Artificial Sequence: Synthetic oligonucleotide
agccaccaaccaaauacca

SEQ ID NO: 163061 - RNA, 19 nt, Artificial Sequence
  Description of Artificial Sequence: Synthetic oligonucleotide
aaaucucucaaccagaagu

SEQ ID NO: 163062 - RNA, 19 nt, Artificial Sequence
  Description of Artificial Sequence: Synthetic oligonucleotide
uguacguggcugcgccagg

SEQ ID NO: 163063 - RNA, 19 nt, Artificial Sequence
  Description of Artificial Sequence: Synthetic oligonucleotide
gggagucgcuagaggugcg

SEQ ID NO: 163064 - RNA, 19 nt, Artificial Sequence
  Description of Artificial Sequence: Synthetic oligonucleotide
gcugccuguugaaagaugc

SEQ ID NO: 163065 - RNA, 19 nt, Artificial Sequence
  Description of Artificial Sequence: Synthetic oligonucleotide
ccgccgugaucaguuggac

SEQ ID NO: 163066 - RNA, 19 nt, Artificial Sequence
  Description of Artificial Sequence: Synthetic oligonucleotide
cuaaggauggggugcacuu

SEQ ID NO: 163067 - RNA, 19 nt, Artificial Sequence
  Description of Artificial Sequence: Synthetic oligonucleotide
uggggcccaacaauaggac

SEQ ID NO: 163068 - RNA, 19 nt, Artificial Sequence
  Description of Artificial Sequence: Synthetic oligonucleotide
cagugcuuauuggggagua

SEQ ID NO: 163069 - RNA, 19 nt, Artificial Sequence
  Description of Artificial Sequence: Synthetic oligonucleotide
acuugcagauaaagggcgc

SEQ ID NO: 163070 - RNA, 19 nt, Artificial Sequence
  Description of Artificial Sequence: Synthetic oligonucleotide
ccacgccuagagacuccgg

SEQ ID NO: 163071 - RNA, 19 nt, Artificial Sequence
  Description of Artificial Sequence: Synthetic oligonucleotide
gccucuaugcuuguacugc

SEQ ID NO: 163072 - RNA, 19 nt, Artificial Sequence
  Description of Artificial Sequence: Synthetic oligonucleotide
ccaguaggacuguagacag

SEQ ID NO: 163073 - RNA, 19 nt, Artificial Sequence
  Description of Artificial Sequence: Synthetic oligonucleotide
gugaaacuugguacuucau

SEQ ID NO: 163074 - RNA, 19 nt, Artificial Sequence
  Description of Artificial Sequence: Synthetic oligonucleotide
uggugaaugucacagaugc

SEQ ID NO: 163075 - RNA, 19 nt, Artificial Sequence
  Description of Artificial Sequence: Synthetic oligonucleotide
ccaucucauccggagauga

SEQ ID NO: 163076 - RNA, 19 nt, Artificial Sequence
  Description of Artificial Sequence: Synthetic oligonucleotide
augaggaugacaccgaugg

SEQ ID NO: 163077 - RNA, 19 nt, Artificial Sequence
  Description of Artificial Sequence: Synthetic oligonucleotide
gugcggaagauuuugucag

SEQ ID NO: 163078 - RNA, 19 nt, Artificial Sequence
  Description of Artificial Sequence: Synthetic oligonucleotide
gugagaacaguaacaacaa

SEQ ID NO: 163079 - RNA, 19 nt, Artificial Sequence
  Description of Artificial Sequence: Synthetic oligonucleotide
agagagcaccauacuggac

SEQ ID NO: 163080 - RNA, 19 nt, Artificial Sequence
  Description of Artificial Sequence: Synthetic oligonucleotide
ccaacacagaaaagaugga

SEQ ID NO: 163081 - RNA, 19 nt, Artificial Sequence
  Description of Artificial Sequence: Synthetic oligonucleotide
aaaagcggcuccaugcugu

SEQ ID NO: 163082 - RNA, 19 nt, Artificial Sequence
  Description of Artificial Sequence: Synthetic oligonucleotide
ugccugcggccaacacugu

SEQ ID NO: 163083 - RNA, 19 nt, Artificial Sequence
  Description of Artificial Sequence: Synthetic oligonucleotide
ucaaguuucgcugcccagc

SEQ ID NO: 163084 - RNA, 19 nt, Artificial Sequence
  Description of Artificial Sequence: Synthetic oligonucleotide
ccggggggaacccaaugcc

SEQ ID NO: 163085 - RNA, 19 nt, Artificial Sequence
  Description of Artificial Sequence: Synthetic oligonucleotide
caaccaugcgguggcugaa

SEQ ID NO: 163086 - RNA, 19 nt, Artificial Sequence
  Description of Artificial Sequence: Synthetic oligonucleotide
aaaacgggaaggaguuuaa

SEQ ID NO: 163087 - RNA, 19 nt, Artificial Sequence
  Description of Artificial Sequence: Synthetic oligonucleotide
agcaggagcaucgcauugg

SEQ ID NO: 163088 - RNA, 19 nt, Artificial Sequence
  Description of Artificial Sequence: Synthetic oligonucleotide
gaggcuacaagguacgaaa

SEQ ID NO: 163089 - RNA, 19 nt, Artificial Sequence
  Description of Artificial Sequence: Synthetic oligonucleotide
accagcacuggagccucau

SEQ ID NO: 163090 - RNA, 19 nt, Artificial Sequence
  Description of Artificial Sequence: Synthetic oligonucleotide
uuauggaaagugugguccc

SEQ ID NO: 163091 - RNA, 19 nt, Artificial Sequence
  Description of Artificial Sequence: Synthetic oligonucleotide
caucugacaagggaaauua

SEQ ID NO: 163092 - RNA, 19 nt, Artificial Sequence
  Description of Artificial Sequence: Synthetic oligonucleotide
auaccuguguaguggagaa

SEQ ID NO: 163093 - RNA, 19 nt, Artificial Sequence
  Description of Artificial Sequence: Synthetic oligonucleotide
augaauacggguccaucaa

SEQ ID NO: 163094 - RNA, 19 nt, Artificial Sequence
  Description of Artificial Sequence: Synthetic oligonucleotide
aucacacguaccaccugga

SEQ ID NO: 163095 - RNA, 19 nt, Artificial Sequence
  Description of Artificial Sequence: Synthetic oligonucleotide
auguuguggagcgaucgcc

SEQ ID NO: 163096 - RNA, 19 nt, Artificial Sequence
  Description of Artificial Sequence: Synthetic oligonucleotide
cucaccggcccauccucca

SEQ ID NO: 163097 - RNA, 19 nt, Artificial Sequence
  Description of Artificial Sequence: Synthetic oligonucleotide
aagccggacugccggcaaa

SEQ ID NO: 163098 - RNA, 19 nt, Artificial Sequence
  Description of Artificial Sequence: Synthetic oligonucleotide
augccuccacaguggucgg

SEQ ID NO: 163099 - RNA, 19 nt, Artificial Sequence
  Description of Artificial Sequence: Synthetic oligonucleotide
gaggagacguagaguuugu

SEQ ID NO: 163100 - RNA, 19 nt, Artificial Sequence
  Description of Artificial Sequence: Synthetic oligonucleotide
ucugcaagguuuacaguga

SEQ ID NO: 163101 - RNA, 19 nt, Artificial Sequence
  Description of Artificial Sequence: Synthetic oligonucleotide
augcccagccccacaucca

SEQ ID NO: 163102 - RNA, 19 nt, Artificial Sequence
  Description of Artificial Sequence: Synthetic oligonucleotide
aguggaucaagcacgugga

SEQ ID NO: 163103 - RNA, 19 nt, Artificial Sequence
  Description of Artificial Sequence: Synthetic oligonucleotide
aaaagaacggcaguaaaua

SEQ ID NO: 163104 - RNA, 19 nt, Artificial Sequence
  Description of Artificial Sequence: Synthetic oligonucleotide
acgggcccgacgggcugcc

SEQ ID NO: 163105 - RNA, 19 nt, Artificial Sequence
  Description of Artificial Sequence: Synthetic oligonucleotide
ccuaccucaagguucucaa

SEQ ID NO: 163106 - RNA, 19 nt, Artificial Sequence
  Description of Artificial Sequence: Synthetic oligonucleotide
aggccgccgguguuaacac

SEQ ID NO: 163107 - RNA, 19 nt, Artificial Sequence
  Description of Artificial Sequence: Synthetic oligonucleotide
ccacggacaaagagauuga

SEQ ID NO: 163108 - RNA, 19 nt, Artificial Sequence
  Description of Artificial Sequence: Synthetic oligonucleotide
agguucucuauauucggaa

SEQ ID NO: 163109 - RNA, 19 nt, Artificial Sequence
  Description of Artificial Sequence: Synthetic oligonucleotide
auguaacuuuugaggacgc

SEQ ID NO: 163110 - RNA, 19 nt, Artificial Sequence
  Description of Artificial Sequence: Synthetic oligonucleotide
cuggggaauauacgugcuu

SEQ ID NO: 163111 - RNA, 19 nt, Artificial Sequence
  Description of Artificial Sequence: Synthetic oligonucleotide
uggcggguaauucuauugg

SEQ ID NO: 163112 - RNA, 19 nt, Artificial Sequence
  Description of Artificial Sequence: Synthetic oligonucleotide
ggauauccuuucacucugc

SEQ ID NO: 163113 - RNA, 19 nt, Artificial Sequence
  Description of Artificial Sequence: Synthetic oligonucleotide
caugguugacaguucugcc

SEQ ID NO: 163114 - RNA, 19 nt, Artificial Sequence
  Description of Artificial Sequence: Synthetic oligonucleotide
cagcgccuggaagagaaaa

SEQ ID NO: 163115 - RNA, 19 nt, Artificial Sequence
  Description of Artificial Sequence: Synthetic oligonucleotide
aggagauuacagcuucccc

SEQ ID NO: 163116 - RNA, 19 nt, Artificial Sequence
  Description of Artificial Sequence: Synthetic oligonucleotide
cagacuaccuggagauagc

SEQ ID NO: 163117 - RNA, 19 nt, Artificial Sequence
  Description of Artificial Sequence: Synthetic oligonucleotide
ccauuuacugcauaggggu

SEQ ID NO: 163118 - RNA, 19 nt, Artificial Sequence
  Description of Artificial Sequence: Synthetic oligonucleotide
ucuucuuaaucgccuguau

SEQ ID NO: 163119 - RNA, 19 nt, Artificial Sequence
  Description of Artificial Sequence: Synthetic oligonucleotide
uggugguaacagucauccu

SEQ ID NO: 163120 - RNA, 19 nt, Artificial Sequence
  Description of Artificial Sequence: Synthetic oligonucleotide
ugugccgaaugaagaacac

SEQ ID NO: 163121 - RNA, 19 nt, Artificial Sequence
  Description of Artificial Sequence: Synthetic oligonucleotide
cgaccaagaagccagacuu

SEQ ID NO: 163122 - RNA, 19 nt, Artificial Sequence
  Description of Artificial Sequence: Synthetic oligonucleotide
ucagcagccagccggcugu

SEQ ID NO: 163123 - RNA, 19 nt, Artificial Sequence
  Description of Artificial Sequence: Synthetic oligonucleotide
ugcacaagcugaccaaacg

SEQ ID NO: 163124 - RNA, 19 nt, Artificial Sequence
  Description of Artificial Sequence: Synthetic oligonucleotide
guaucccccugcggagaca

SEQ ID NO: 163125 - RNA, 19 nt, Artificial Sequence
  Description of Artificial Sequence: Synthetic oligonucleotide
agguaacaguuucggcuga

SEQ ID NO: 163126 - RNA, 19 nt, Artificial Sequence
  Description of Artificial Sequence: Synthetic oligonucleotide
aguccagcuccuccaugaa

SEQ ID NO: 163127 - RNA, 19 nt, Artificial Sequence
  Description of Artificial Sequence: Synthetic oligonucleotide
acuccaacaccccgcuggu

SEQ ID NO: 163128 - RNA, 19 nt, Artificial Sequence
  Description of Artificial Sequence: Synthetic oligonucleotide
ugaggauaacaacacgccu

SEQ ID NO: 163129 - RNA, 19 nt, Artificial Sequence
  Description of Artificial Sequence: Synthetic oligonucleotide
ucucuucaacggcagacac

SEQ ID NO: 163130 - RNA, 19 nt, Artificial Sequence
  Description of Artificial Sequence: Synthetic oligonucleotide
cccccaugcuggcaggggu

SEQ ID NO: 163131 - RNA, 19 nt, Artificial Sequence
  Description of Artificial Sequence: Synthetic oligonucleotide
ucuccgaguaugaacuucc

SEQ ID NO: 163132 - RNA, 19 nt, Artificial Sequence
  Description of Artificial Sequence: Synthetic oligonucleotide
cagaggacccaaaauggga

SEQ ID NO: 163133 - RNA, 19 nt, Artificial Sequence
  Description of Artificial Sequence: Synthetic oligonucleotide
aguuuccaagagauaagcu

SEQ ID NO: 163134 - RNA, 19 nt, Artificial Sequence
  Description of Artificial Sequence: Synthetic oligonucleotide
ugacacugggcaagccccu

SEQ ID NO: 163135 - RNA, 19 nt, Artificial Sequence
  Description of Artificial Sequence: Synthetic oligonucleotide
ugggagaagguugcuuugg

SEQ ID NO: 163136 - RNA, 19 nt, Artificial Sequence
  Description of Artificial Sequence: Synthetic oligonucleotide
ggcaaguggucauggcgga

SEQ ID NO: 163137 - RNA, 19 nt, Artificial Sequence
  Description of Artificial Sequence: Synthetic oligonucleotide
aagcagugggaauugacaa

SEQ ID NO: 163138 - RNA, 19 nt, Artificial Sequence
  Description of Artificial Sequence: Synthetic oligonucleotide
aagacaagcccaaggaggc

SEQ ID NO: 163139 - RNA, 19 nt, Artificial Sequence
  Description of Artificial Sequence: Synthetic oligonucleotide
cggucaccguggccgugaa

SEQ ID NO: 163140 - RNA, 19 nt, Artificial Sequence
  Description of Artificial Sequence: Synthetic oligonucleotide
agauguugaaagaugaugc

SEQ ID NO: 163141 - RNA, 19 nt, Artificial Sequence
  Description of Artificial Sequence: Synthetic oligonucleotide
ccacagagaaagaccuuuc

SEQ ID NO: 163142 - RNA, 19 nt, Artificial Sequence
  Description of Artificial Sequence: Synthetic oligonucleotide
cugaucuggugucagagau

SEQ ID NO: 163143 - RNA, 19 nt, Artificial Sequence
  Description of Artificial Sequence: Synthetic oligonucleotide
uggagaugaugaagaugau

SEQ ID NO: 163144 - RNA, 19 nt, Artificial Sequence
  Description of Artificial Sequence: Synthetic oligonucleotide
uugggaaacacaagaauau

SEQ ID NO: 163145 - RNA, 19 nt, Artificial Sequence
  Description of Artificial Sequence: Synthetic oligonucleotide
ucauaaaucuucuuggagc

SEQ ID NO: 163146 - RNA, 19 nt, Artificial Sequence
  Description of Artificial Sequence: Synthetic oligonucleotide
ccugcacacaggaugggcc

SEQ ID NO: 163147 - RNA, 19 nt, Artificial Sequence
  Description of Artificial Sequence: Synthetic oligonucleotide
cucucuaugucauaguuga

SEQ ID NO: 163148 - RNA, 19 nt, Artificial Sequence
  Description of Artificial Sequence: Synthetic oligonucleotide
aguaugccucuaaaggcaa

SEQ ID NO: 163149 - RNA, 19 nt, Artificial Sequence
  Description of Artificial Sequence: Synthetic oligonucleotide
accuccgagaauaccuccg

SEQ ID NO: 163150 - RNA, 19 nt, Artificial Sequence
  Description of Artificial Sequence: Synthetic oligonucleotide
gagcccggaggccacccgg

SEQ ID NO: 163151 - RNA, 19 nt, Artificial Sequence
  Description of Artificial Sequence: Synthetic oligonucleotide
ggauggaguacuccuauga

SEQ ID NO: 163152 - RNA, 19 nt, Artificial Sequence
  Description of Artificial Sequence: Synthetic oligonucleotide
acauuaaccguguuccuga

SEQ ID NO: 163153 - RNA, 19 nt, Artificial Sequence
  Description of Artificial Sequence: Synthetic oligonucleotide
aggagcagaugaccuucaa

SEQ ID NO: 163154 - RNA, 19 nt, Artificial Sequence
  Description of Artificial Sequence: Synthetic oligonucleotide
aggacuuggugucaugcac

SEQ ID NO: 163155 - RNA, 19 nt, Artificial Sequence
  Description of Artificial Sequence: Synthetic oligonucleotide
ccuaccagcuggccagagg

SEQ ID NO: 163156 - RNA, 19 nt, Artificial Sequence
  Description of Artificial Sequence: Synthetic oligonucleotide
gcauggaguacuuggcuuc

SEQ ID NO: 163157 - RNA, 19 nt, Artificial Sequence
  Description of Artificial Sequence: Synthetic oligonucleotide
cccaaaaauguauucaucg

SEQ ID NO: 163158 - RNA, 19 nt, Artificial Sequence
  Description of Artificial Sequence: Synthetic oligonucleotide
gagauuuagcagccagaaa

SEQ ID NO: 163159 - RNA, 19 nt, Artificial Sequence
  Description of Artificial Sequence: Synthetic oligonucleotide
auguuuugguaacagaaaa

SEQ ID NO: 163160 - RNA, 19 nt, Artificial Sequence
  Description of Artificial Sequence: Synthetic oligonucleotide
acaaugugaugaaaauagc

SEQ ID NO: 163161 - RNA, 19 nt, Artificial Sequence
  Description of Artificial Sequence: Synthetic oligonucleotide
cagacuuuggacucgccag

SEQ ID NO: 163162 - RNA, 19 nt, Artificial Sequence
  Description of Artificial Sequence: Synthetic oligonucleotide
gagauaucaacaauauaga

SEQ ID NO: 163163 - RNA, 19 nt, Artificial Sequence
  Description of Artificial Sequence: Synthetic oligonucleotide
acuauuacaaaaagaccac

SEQ ID NO: 163164 - RNA, 19 nt, Artificial Sequence
  Description of Artificial Sequence: Synthetic oligonucleotide
ccaaugggcggcuuccagu

SEQ ID NO: 163165 - RNA, 19 nt, Artificial Sequence
  Description of Artificial Sequence: Synthetic oligonucleotide
ucaaguggauggcuccaga

SEQ ID NO: 163166 - RNA, 19 nt, Artificial Sequence
  Description of Artificial Sequence: Synthetic oligonucleotide
aagcccuguuugauagagu

SEQ ID NO: 163167 - RNA, 19 nt, Artificial Sequence
  Description of Artificial Sequence: Synthetic oligonucleotide
uauacacucaucagaguga

SEQ ID NO: 163168 - RNA, 19 nt, Artificial Sequence
  Description of Artificial Sequence: Synthetic oligonucleotide
augucugguccuucggggu

SEQ ID NO: 163169 - RNA, 19 nt, Artificial Sequence
  Description of Artificial Sequence: Synthetic oligonucleotide
uguuaaugugggagaucuu

SEQ ID NO: 163170 - RNA, 19 nt, Artificial Sequence
  Description of Artificial Sequence: Synthetic oligonucleotide
ucacuuuagggggcucgcc

SEQ ID NO: 163171 - RNA, 19 nt, Artificial Sequence
  Description of Artificial Sequence: Synthetic oligonucleotide
ccuacccagggauucccgu

SEQ ID NO: 163172 - RNA, 19 nt, Artificial Sequence
  Description of Artificial Sequence: Synthetic oligonucleotide
uggaggaacuuuuuaagcu

SEQ ID NO: 163173 - RNA, 19 nt, Artificial Sequence
  Description of Artificial Sequence: Synthetic oligonucleotide
ugcugaaggaaggacacag

SEQ ID NO: 163174 - RNA, 19 nt, Artificial Sequence
  Description of Artificial Sequence: Synthetic oligonucleotide
gaauggauaagccagccaa

SEQ ID NO: 163175 - RNA, 19 nt, Artificial Sequence
  Description of Artificial Sequence: Synthetic oligonucleotide
acugcaccaacgaacugua

SEQ ID NO: 163176 - RNA, 19 nt, Artificial Sequence
  Description of Artificial Sequence: Synthetic oligonucleotide
acaugaugaugagggacug

SEQ ID NO: 163177 - RNA, 19 nt, Artificial Sequence
  Description of Artificial Sequence: Synthetic oligonucleotide
guuggcaugcagugcccuc

SEQ ID NO: 163178 - RNA, 19 nt, Artificial Sequence
  Description of Artificial Sequence: Synthetic oligonucleotide
cccagagaccaacguucaa

SEQ ID NO: 163179 - RNA, 19 nt, Artificial Sequence
  Description of Artificial Sequence: Synthetic oligonucleotide
agcaguugguagaagacuu

SEQ ID NO: 163180 - RNA, 19 nt, Artificial Sequence
  Description of Artificial Sequence: Synthetic oligonucleotide
uggaucgaauucucacucu

SEQ ID NO: 163181 - RNA, 19 nt, Artificial Sequence
  Description of Artificial Sequence: Synthetic oligonucleotide
ucacaaccaaugaggaaua

SEQ ID NO: 163182 - RNA, 19 nt, Artificial Sequence
  Description of Artificial Sequence: Synthetic oligonucleotide
acuuggaccucagccaacc

SEQ ID NO: 163183 - RNA, 19 nt, Artificial Sequence
  Description of Artificial Sequence: Synthetic oligonucleotide
cucucgaacaguauucacc

SEQ ID NO: 163184 - RNA, 19 nt, Artificial Sequence
  Description of Artificial Sequence: Synthetic oligonucleotide
cuaguuacccugacacaag

SEQ ID NO: 163185 - RNA, 19 nt, Artificial Sequence
  Description of Artificial Sequence: Synthetic oligonucleotide
gaaguucuuguucuucagg

SEQ ID NO: 163186 - RNA, 19 nt, Artificial Sequence
  Description of Artificial Sequence: Synthetic oligonucleotide
gagaugauucuguuuuuuc

SEQ ID NO: 163187 - RNA, 19 nt, Artificial Sequence
  Description of Artificial Sequence: Synthetic oligonucleotide
cuccagaccccaugccuua

SEQ ID NO: 163188 - RNA, 19 nt, Artificial Sequence
  Description of Artificial Sequence: Synthetic oligonucleotide
acgaaccaugccuuccuca

SEQ ID NO: 163189 - RNA, 19 nt, Artificial Sequence
  Description of Artificial Sequence: Synthetic oligonucleotide
aguauccacacauaaacgg

SEQ ID NO: 163190 - RNA, 19 nt, Artificial Sequence
  Description of Artificial Sequence: Synthetic oligonucleotide
gcaguguuaaaacaugaau

SEQ ID NO: 163191 - RNA, 19 nt, Artificial Sequence
  Description of Artificial Sequence: Synthetic oligonucleotide
ugacugugucugccugucc

SEQ ID NO: 163192 - RNA, 19 nt, Artificial Sequence
  Description of Artificial Sequence: Synthetic oligonucleotide
cccaaacaggacagcacug

SEQ ID NO: 163193 - RNA, 19 nt, Artificial Sequence
  Description of Artificial Sequence: Synthetic oligonucleotide
gggaaccuagcuacacuga

SEQ ID NO: 163194 - RNA, 19 nt, Artificial Sequence
  Description of Artificial Sequence: Synthetic oligonucleotide
agcagggagaccaugccuc

SEQ ID NO: 163195 - RNA, 19 nt, Artificial Sequence
  Description of Artificial Sequence: Synthetic oligonucleotide
cccagagcuuguugucucc

SEQ ID NO: 163196 - RNA, 19 nt, Artificial Sequence
  Description of Artificial Sequence: Synthetic oligonucleotide
cacuuguauauauggauca

SEQ ID NO: 163197 - RNA, 19 nt, Artificial Sequence
  Description of Artificial Sequence: Synthetic oligonucleotide
agaggaguaaauaauugga

SEQ ID NO: 163198 - RNA, 19 nt, Artificial Sequence
  Description of Artificial Sequence: Synthetic oligonucleotide
aaaaguaaucagcauaugu

SEQ ID NO: 163199 - RNA, 19 nt, Artificial Sequence
  Description of Artificial Sequence: Synthetic oligonucleotide
uguaaagauuuauacaguu

SEQ ID NO: 163200 - RNA, 19 nt, Artificial Sequence
  Description of Artificial Sequence: Synthetic oligonucleotide
ugaaaacuuguaaucuucc

SEQ ID NO: 163201 - RNA, 19 nt, Artificial Sequence
  Description of Artificial Sequence: Synthetic oligonucleotide
cccaggaggagaagaaggu

SEQ ID NO: 163202 - RNA, 19 nt, Artificial Sequence
  Description of Artificial Sequence: Synthetic oligonucleotide
uuucuggagcaguggacug

SEQ ID NO: 163203 - RNA, 19 nt, Artificial Sequence
  Description of Artificial Sequence: Synthetic oligonucleotide
gccacaagccaccauguaa

SEQ ID NO: 163204 - RNA, 19 nt, Artificial Sequence
  Description of Artificial Sequence: Synthetic oligonucleotide
accccucucaccugccgug

SEQ ID NO: 163205 - RNA, 19 nt, Artificial Sequence
  Description of Artificial Sequence: Synthetic oligonucleotide
gcguacuggcuguggacca

SEQ ID NO: 163206 - RNA, 19 nt, Artificial Sequence
  Description of Artificial Sequence: Synthetic oligonucleotide
aguaggacucaagguggac

SEQ ID NO: 163207 - RNA, 19 nt, Artificial Sequence
  Description of Artificial Sequence: Synthetic oligonucleotide
cgugcguucugccuuccuu

SEQ ID NO: 163208 - RNA, 19 nt, Artificial Sequence
  Description of Artificial Sequence: Synthetic oligonucleotide
uguuaauuuuguaauaauu

SEQ ID NO: 163209 - RNA, 19 nt, Artificial Sequence
  Description of Artificial Sequence: Synthetic oligonucleotide
uggagaagauuuaugucag

SEQ ID NO: 163210 - RNA, 19 nt, Artificial Sequence
  Description of Artificial Sequence: Synthetic oligonucleotide
gcacacacuuacagagcac

SEQ ID NO: 163211 - RNA, 19 nt, Artificial Sequence
  Description of Artificial Sequence: Synthetic oligonucleotide
caaaugcaguauauaggug

SEQ ID NO: 163212 - RNA, 19 nt, Artificial Sequence
  Description of Artificial Sequence: Synthetic oligonucleotide
gcuggauguauguaaauau

SEQ ID NO: 163213 - RNA, 19 nt, Artificial Sequence
  Description of Artificial Sequence: Synthetic oligonucleotide
uauucaaauuauguauaaa

SEQ ID NO: 163214 - RNA, 19 nt, Artificial Sequence
  Description of Artificial Sequence: Synthetic oligonucleotide
auauauauuauauauuuac

SEQ ID NO: 163215 - RNA, 19 nt, Artificial Sequence
  Description of Artificial Sequence: Synthetic oligonucleotide
caaggaguuauuuuuugua

SEQ ID NO: 163216 - RNA, 19 nt, Artificial Sequence
  Description of Artificial Sequence: Synthetic oligonucleotide
auugauuuuaaauggaugu

SEQ ID NO: 163217 - RNA, 19 nt, Artificial Sequence
  Description of Artificial Sequence: Synthetic oligonucleotide
ucccaaugcaccuagaaaa

SEQ ID NO: 163218 - RNA, 19 nt, Artificial Sequence
  Description of Artificial Sequence: Synthetic oligonucleotide
auuggucucucuuuuuuua

SEQ ID NO: 163219 - RNA, 19 nt, Artificial Sequence
  Description of Artificial Sequence: Synthetic oligonucleotide
aauagcuauuugcuaaaug

SEQ ID NO: 163220 - RNA, 19 nt, Artificial Sequence
  Description of Artificial Sequence: Synthetic oligonucleotide
gcuguucuuacacauaauu

SEQ ID NO: 163221 - RNA, 19 nt, Artificial Sequence
  Description of Artificial Sequence: Synthetic oligonucleotide
uucuuaauuuucaccgagc

SEQ ID NO: 163222 - RNA, 19 nt, Artificial Sequence
  Description of Artificial Sequence: Synthetic oligonucleotide
cagagguggaaaaauacuu

SEQ ID NO: 163223 - RNA, 19 nt, Artificial Sequence
  Description of Artificial Sequence: Synthetic oligonucleotide
uuugcuuucagggaaaaug

SEQ ID NO: 163224 - RNA, 19 nt, Artificial Sequence
  Description of Artificial Sequence: Synthetic oligonucleotide
gguauaacguuaauuuauu

SEQ ID NO: 163225 - RNA, 19 nt, Artificial Sequence
  Description of Artificial Sequence: Synthetic oligonucleotide
uaauaaauugguaauauac

SEQ ID NO: 163226 - RNA, 19 nt, Artificial Sequence
  Description of Artificial Sequence: Synthetic oligonucleotide
caaaacaauuaaucauuua

SEQ ID NO: 163227 - RNA, 19 nt, Artificial Sequence
  Description of Artificial Sequence: Synthetic oligonucleotide
auaguuuuuuuuguaauuu

SEQ ID NO: 163228 - RNA, 19 nt, Artificial Sequence
  Description of Artificial Sequence: Synthetic oligonucleotide
uaaguggcauuucuaugca

SEQ ID NO: 163229 - RNA, 19 nt, Artificial Sequence
  Description of Artificial Sequence: Synthetic oligonucleotide
aggcagcacagcagacuag

SEQ ID NO: 163230 - RNA, 19 nt, Artificial Sequence
  Description of Artificial Sequence: Synthetic oligonucleotide
guuaaucuauugcuuggac

SEQ ID NO: 163231 - RNA, 19 nt, Artificial Sequence
  Description of Artificial Sequence: Synthetic oligonucleotide
cuuaacuaguuaucagauc

SEQ ID NO: 163232 - RNA, 19 nt, Artificial Sequence
  Description of Artificial Sequence: Synthetic oligonucleotide
ccuuugaaaagagaauauu

SEQ ID NO: 163233 - RNA, 19 nt, Artificial Sequence
  Description of Artificial Sequence: Synthetic oligonucleotide
uuacaauauaugacuaauu

SEQ ID NO: 163234 - RNA, 19 nt, Artificial Sequence
  Description of Artificial Sequence: Synthetic oligonucleotide
uuggggaaaaugaaguuuu

SEQ ID NO: 163235 - RNA, 19 nt, Artificial Sequence
  Description of Artificial Sequence: Synthetic oligonucleotide
ugauuuauuuguguuuaaa

SEQ ID NO: 163236 - RNA, 19 nt, Artificial Sequence
  Description of Artificial Sequence: Synthetic oligonucleotide
augcugcugucagacgauu

SEQ ID NO: 163237 - RNA, 19 nt, Artificial Sequence
  Description of Artificial Sequence: Synthetic oligonucleotide
uguucuuagaccuccuaaa

SEQ ID NO: 163238 - RNA, 19 nt, Artificial Sequence
  Description of Artificial Sequence: Synthetic oligonucleotide
augccccauauuaaaagaa

SEQ ID NO: 163239 - RNA, 19 nt, Artificial Sequence
  Description of Artificial Sequence: Synthetic oligonucleotide
acucauucauaggaaggug

SEQ ID NO: 163240 - RNA, 19 nt, Artificial Sequence
  Description of Artificial Sequence: Synthetic oligonucleotide
guuucauuuuggugugcaa

SEQ ID NO: 163241 - RNA, 19 nt, Artificial Sequence
  Description of Artificial Sequence: Synthetic oligonucleotide
acccugucauuacgucaac

SEQ ID NO: 163242 - RNA, 19 nt, Artificial Sequence
  Description of Artificial Sequence: Synthetic oligonucleotide
cgcaacgucuaacuggacu

SEQ ID NO: 163243 - RNA, 19 nt, Artificial Sequence
  Description of Artificial Sequence: Synthetic oligonucleotide
uucccaagauaaaugguac

SEQ ID NO: 163244 - RNA, 19 nt, Artificial Sequence
  Description of Artificial Sequence: Synthetic oligonucleotide
ccagcguccucuuaaaaga

SEQ ID NO: 163245 - RNA, 19 nt, Artificial Sequence
  Description of Artificial Sequence: Synthetic oligonucleotide
augccuuaauccauuccuu

SEQ ID NO: 163246 - RNA, 19 nt, Artificial Sequence
  Description of Artificial Sequence: Synthetic oligonucleotide
ugaggacagaccuuaguug

SEQ ID NO: 163247 - RNA, 19 nt, Artificial Sequence
  Description of Artificial Sequence: Synthetic oligonucleotide
gaaaugauagcagaaugug

SEQ ID NO: 163248 - RNA, 19 nt, Artificial Sequence
  Description of Artificial Sequence: Synthetic oligonucleotide
gcuucucucuggcagcugg

SEQ ID NO: 163249 - RNA, 19 nt, Artificial Sequence
  Description of Artificial Sequence: Synthetic oligonucleotide
gccuucugcuucugaguug

SEQ ID NO: 163250 - RNA, 19 nt, Artificial Sequence
  Description of Artificial Sequence: Synthetic oligonucleotide
gcacauuaaucagauuagc

SEQ ID NO: 163251 - RNA, 19 nt, Artificial Sequence
  Description of Artificial Sequence: Synthetic oligonucleotide
ccuguauucucuucaguga

SEQ ID NO: 163252 - RNA, 19 nt, Artificial Sequence
  Description of Artificial Sequence: Synthetic oligonucleotide
aauuuugauaauggcuucc

SEQ ID NO: 163253 - RNA, 19 nt, Artificial Sequence
  Description of Artificial Sequence: Synthetic oligonucleotide
cagacucuuuggcguugga

SEQ ID NO: 163254 - RNA, 19 nt, Artificial Sequence
  Description of Artificial Sequence: Synthetic oligonucleotide
agacgccuguuaggaucuu

SEQ ID NO: 163255 - RNA, 19 nt, Artificial Sequence
  Description of Artificial Sequence: Synthetic oligonucleotide
ucaagucccaucauagaaa

SEQ ID NO: 163256 - RNA, 19 nt, Artificial Sequence
  Description of Artificial Sequence: Synthetic oligonucleotide
aauugaaacacagaguugu

SEQ ID NO: 163257 - RNA, 19 nt, Artificial Sequence
  Description of Artificial Sequence: Synthetic oligonucleotide
uucugcugauaguuuuggg

SEQ ID NO: 163258 - RNA, 19 nt, Artificial Sequence
  Description of Artificial Sequence: Synthetic oligonucleotide
ggauacguccaucuuuuua

SEQ ID NO: 163259 - RNA, 19 nt, Artificial Sequence
  Description of Artificial Sequence: Synthetic oligonucleotide
aagggauugcuuucaucua

SEQ ID NO: 163260 - RNA, 19 nt, Artificial Sequence
  Description of Artificial Sequence: Synthetic oligonucleotide
aauucuggcaggaccucac

SEQ ID NO: 163261 - RNA, 19 nt, Artificial Sequence
  Description of Artificial Sequence: Synthetic oligonucleotide
ccaaaagauccagccucau

SEQ ID NO: 163262 - RNA, 19 nt, Artificial Sequence
  Description of Artificial Sequence: Synthetic oligonucleotide
uaccuacaucagacaaaau

SEQ ID NO: 163263 - RNA, 19 nt, Artificial Sequence
  Description of Artificial Sequence: Synthetic oligonucleotide
uaucgccguuguuccuucu

SEQ ID NO: 163264 - RNA, 19 nt, Artificial Sequence
  Description of Artificial Sequence: Synthetic oligonucleotide
uguacuaaaguauuguguu

SEQ ID NO: 163265 - RNA, 19 nt, Artificial Sequence
  Description of Artificial Sequence: Synthetic oligonucleotide
uuugcuuuggaaacaccca

SEQ ID NO: 163266 - RNA, 19 nt, Artificial Sequence
  Description of Artificial Sequence: Synthetic oligonucleotide
acucacuuugcaauagccg

SEQ ID NO: 163267 - RNA, 19 nt, Artificial Sequence
  Description of Artificial Sequence: Synthetic oligonucleotide
gugcaagaugaaugcagau

SEQ ID NO: 163268 - RNA, 19 nt, Artificial Sequence
  Description of Artificial Sequence: Synthetic oligonucleotide
uuacacugaucuuaugugu

SEQ ID NO: 163269 - RNA, 19 nt, Artificial Sequence
  Description of Artificial Sequence: Synthetic oligonucleotide
uuacaaaauuggagaaagu

SEQ ID NO: 163270 - RNA, 19 nt, Artificial Sequence
  Description of Artificial Sequence: Synthetic oligonucleotide
uauuuaauaaaaccuguua

SEQ ID NO: 163271 - RNA, 19 nt, Artificial Sequence
  Description of Artificial Sequence: Synthetic oligonucleotide
aauuuuuauacugacaaua

SEQ ID NO: 163272 - RNA, 19 nt, Artificial Sequence
  Description of Artificial Sequence: Synthetic oligonucleotide
aaaaauguuucuacagaua

SEQ ID NO: 163273 - RNA, 19 nt, Artificial Sequence
  Description of Artificial Sequence: Synthetic oligonucleotide
auuaauguuaacaagacaa

SEQ ID NO: 163274 - RNA, 19 nt, Artificial Sequence
  Description of Artificial Sequence: Synthetic oligonucleotide
aaauaaaugucacgcaacu

SEQ ID NO: 163275 - RNA, 19 nt, Artificial Sequence
  Description of Artificial Sequence: Synthetic oligonucleotide
agcacucggggauaaauag

SEQ ID NO: 163276 - RNA, 19 nt, Artificial Sequence
  Description of Artificial Sequence: Synthetic oligonucleotide
guuccaaugcagaagugcu

SEQ ID NO: 163277 - RNA, 19 nt, Artificial Sequence
  Description of Artificial Sequence: Synthetic oligonucleotide
uggcucuguucaaugugac

SEQ ID NO: 163278 - RNA, 19 nt, Artificial Sequence
  Description of Artificial Sequence: Synthetic oligonucleotide
ccgaggcggaugcugggga

SEQ ID NO: 163279 - RNA, 19 nt, Artificial Sequence
  Description of Artificial Sequence: Synthetic oligonucleotide
aauauauauguaaggucuc

SEQ ID NO: 163280 - RNA, 19 nt, Artificial Sequence
  Description of Artificial Sequence: Synthetic oligonucleotide
ccaauuauauagggcaggc

SEQ ID NO: 163281 - RNA, 19 nt, Artificial Sequence
  Description of Artificial Sequence: Synthetic oligonucleotide
ccaaccagucugccuggcu

SEQ ID NO: 163282 - RNA, 19 nt, Artificial Sequence
  Description of Artificial Sequence: Synthetic oligonucleotide
ucacuguccugccaaaaca

SEQ ID NO: 163283 - RNA, 19 nt, Artificial Sequence
  Description of Artificial Sequence: Synthetic oligonucleotide
agcaagcgccuggaagaga

SEQ ID NO: 163284 - RNA, 19 nt, Artificial Sequence
  Description of Artificial Sequence: Synthetic oligonucleotide
aaaaggagauuacagcuuc

SEQ ID NO: 163285 - RNA, 19 nt, Artificial Sequence
  Description of Artificial Sequence: Synthetic oligonucleotide
ccccagacuaccuggagau

SEQ ID NO: 163286 - RNA, 19 nt, Artificial Sequence
  Description of Artificial Sequence: Synthetic oligonucleotide
uagccauuuacugcauagg

SEQ ID NO: 163287 - RNA, 19 nt, Artificial Sequence
  Description of Artificial Sequence: Synthetic oligonucleotide
gggucuucuuaaucgccug

SEQ ID NO: 163288 - RNA, 19 nt, Artificial Sequence
  Description of Artificial Sequence: Synthetic oligonucleotide
guauggugguaacagucau

SEQ ID NO: 163289 - RNA, 19 nt, Artificial Sequence
  Description of Artificial Sequence: Synthetic oligonucleotide
uccugugccgaaugaagaa

SEQ ID NO: 163290 - RNA, 19 nt, Artificial Sequence
  Description of Artificial Sequence: Synthetic oligonucleotide
acacgaccaagaagccaga

SEQ ID NO: 163291 - RNA, 19 nt, Artificial Sequence
  Description of Artificial Sequence: Synthetic oligonucleotide
acuucagcagccagccggc

SEQ ID NO: 163292 - RNA, 19 nt, Artificial Sequence
  Description of Artificial Sequence: Synthetic oligonucleotide
cugugcacaagcugaccaa

SEQ ID NO: 163293 - RNA, 19 nt, Artificial Sequence
  Description of Artificial Sequence: Synthetic oligonucleotide
aacguaucccccugcggag

SEQ ID NO: 163294 - RNA, 19 nt, Artificial Sequence
  Description of Artificial Sequence: Synthetic oligonucleotide
gacagguaacaguuucggc

SEQ ID NO: 163295 - RNA, 19 nt, Artificial Sequence
  Description of Artificial Sequence: Synthetic oligonucleotide
cugaguccagcuccuccau

SEQ ID NO: 163296 - RNA, 19 nt, Artificial Sequence
  Description of Artificial Sequence: Synthetic oligonucleotide
ugaacuccaacaccccgcu

SEQ ID NO: 163297 - RNA, 19 nt, Artificial Sequence
  Description of Artificial Sequence: Synthetic oligonucleotide
uggugaggauaacaacacg

SEQ ID NO: 163298 - RNA, 19 nt, Artificial Sequence
  Description of Artificial Sequence: Synthetic oligonucleotide
gccucucuucaacggcaga

SEQ ID NO: 163299 - RNA, 19 nt, Artificial Sequence
  Description of Artificial Sequence: Synthetic oligonucleotide
acacccccaugcuggcagg

SEQ ID NO: 163300 - RNA, 19 nt, Artificial Sequence
  Description of Artificial Sequence: Synthetic oligonucleotide
gggucuccgaguaugaacu

SEQ ID NO: 163301 - RNA, 19 nt, Artificial Sequence
  Description of Artificial Sequence: Synthetic oligonucleotide
uuccagaggacccaaaaug

SEQ ID NO: 163302 - RNA, 19 nt, Artificial Sequence
  Description of Artificial Sequence: Synthetic oligonucleotide
gggaguuuccaagagauaa

SEQ ID NO: 163303 - RNA, 19 nt, Artificial Sequence
  Description of Artificial Sequence: Synthetic oligonucleotide
agcugacacugggcaagcc

SEQ ID NO: 163304 - RNA, 19 nt, Artificial Sequence
  Description of Artificial Sequence: Synthetic oligonucleotide
cccugggagaagguugcuu

SEQ ID NO: 163305 - RNA, 19 nt, Artificial Sequence
  Description of Artificial Sequence: Synthetic oligonucleotide
uugggcaaguggucauggc

SEQ ID NO: 163306 - RNA, 19 nt, Artificial Sequence
  Description of Artificial Sequence: Synthetic oligonucleotide
cggaagcagugggaauuga

SEQ ID NO: 163307 - RNA, 19 nt, Artificial Sequence
  Description of Artificial Sequence: Synthetic oligonucleotide
acaaagacaagcccaagga

SEQ ID NO: 163308 - RNA, 19 nt, Artificial Sequence
  Description of Artificial Sequence: Synthetic oligonucleotide
aggcggucaccguggccgu

SEQ ID NO: 163309 - RNA, 19 nt, Artificial Sequence
  Description of Artificial Sequence: Synthetic oligonucleotide
ugaagauguugaaagauga

SEQ ID NO: 163310 - RNA, 19 nt, Artificial Sequence
  Description of Artificial Sequence: Synthetic oligonucleotide
augccacagagaaagaccu

SEQ ID NO: 163311 - RNA, 19 nt, Artificial Sequence
  Description of Artificial Sequence: Synthetic oligonucleotide
uuucugaucuggugucaga

SEQ ID NO: 163312 - RNA, 19 nt, Artificial Sequence
  Description of Artificial Sequence: Synthetic oligonucleotide
agauggagaugaugaagau

SEQ ID NO: 163313 - RNA, 19 nt, Artificial Sequence
  Description of Artificial Sequence: Synthetic oligonucleotide
ugauugggaaacacaagaa

SEQ ID NO: 163314 - RNA, 19 nt, Artificial Sequence
  Description of Artificial Sequence: Synthetic oligonucleotide
auaucauaaaucuucuugg

SEQ ID NO: 163315 - RNA, 19 nt, Artificial Sequence
  Description of Artificial Sequence: Synthetic oligonucleotide
gagccugcacacaggaugg

SEQ ID NO: 163316 - RNA, 19 nt, Artificial Sequence
  Description of Artificial Sequence: Synthetic oligonucleotide
ggccucucuaugucauagu

SEQ ID NO: 163317 - RNA, 19 nt, Artificial Sequence
  Description of Artificial Sequence: Synthetic oligonucleotide
uugaguaugccucuaaagg

SEQ ID NO: 163318 - RNA, 19 nt, Artificial Sequence
  Description of Artificial Sequence: Synthetic oligonucleotide
gcaaccuccgagaauaccu

SEQ ID NO: 163319 - RNA, 19 nt, Artificial Sequence
  Description of Artificial Sequence: Synthetic oligonucleotide
uccgagcccggaggccacc

SEQ ID NO: 163320 - RNA, 19 nt, Artificial Sequence
  Description of Artificial Sequence: Synthetic oligonucleotide
ccgggauggaguacuccua

SEQ ID NO: 163321 - RNA, 19 nt, Artificial Sequence
  Description of Artificial Sequence: Synthetic oligonucleotide
augacauuaaccguguucc

SEQ ID NO: 163322 - RNA, 19 nt, Artificial Sequence
  Description of Artificial Sequence: Synthetic oligonucleotide
cugaggagcagaugaccuu

SEQ ID NO: 163323 - RNA, 19 nt, Artificial Sequence
  Description of Artificial Sequence: Synthetic oligonucleotide
ucaaggacuuggugucaug

SEQ ID NO: 163324 - RNA, 19 nt, Artificial Sequence
  Description of Artificial Sequence: Synthetic oligonucleotide
gcaccuaccagcuggccag

SEQ ID NO: 163325 - RNA, 19 nt, Artificial Sequence
  Description of Artificial Sequence: Synthetic oligonucleotide
gaggcauggaguacuuggc

SEQ ID NO: 163326 - RNA, 19 nt, Artificial Sequence
  Description of Artificial Sequence: Synthetic oligonucleotide
cuucccaaaaauguauuca

SEQ ID NO: 163327 - RNA, 19 nt, Artificial Sequence
  Description of Artificial Sequence: Synthetic oligonucleotide
aucgagauuuagcagccag

SEQ ID NO: 163328 - RNA, 19 nt, Artificial Sequence
  Description of Artificial Sequence: Synthetic oligonucleotide
gaaauguuuugguaacaga

SEQ ID NO: 163329 - RNA, 19 nt, Artificial Sequence
  Description of Artificial Sequence: Synthetic oligonucleotide
aaaacaaugugaugaaaau

SEQ ID NO: 163330 - RNA, 19 nt, Artificial Sequence
  Description of Artificial Sequence: Synthetic oligonucleotide
uagcagacuuuggacucgc

SEQ ID NO: 163331 - RNA, 19 nt, Artificial Sequence
  Description of Artificial Sequence: Synthetic oligonucleotide
ccagagauaucaacaauau

SEQ ID NO: 163332 - RNA, 19 nt, Artificial Sequence
  Description of Artificial Sequence: Synthetic oligonucleotide
uagacuauuacaaaaagac

SEQ ID NO: 163333 - RNA, 19 nt, Artificial Sequence
  Description of Artificial Sequence: Synthetic oligonucleotide
ccaccaaugggcggcuucc

SEQ ID NO: 163334 - RNA, 19 nt, Artificial Sequence
  Description of Artificial Sequence: Synthetic oligonucleotide
cagucaaguggauggcucc

SEQ ID NO: 163335 - RNA, 19 nt, Artificial Sequence
  Description of Artificial Sequence: Synthetic oligonucleotide
cagaagcccuguuugauag

SEQ ID NO: 163336 - RNA, 19 nt, Artificial Sequence
  Description of Artificial Sequence: Synthetic oligonucleotide
gaguauacacucaucagag

SEQ ID NO: 163337 - RNA, 19 nt, Artificial Sequence
  Description of Artificial Sequence: Synthetic oligonucleotide
gugaugucugguccuucgg

SEQ ID NO: 163338 - RNA, 19 nt, Artificial Sequence
  Description of Artificial Sequence: Synthetic oligonucleotide
ggguguuaaugugggagau

SEQ ID NO: 163339 - RNA, 19 nt, Artificial Sequence
  Description of Artificial Sequence: Synthetic oligonucleotide
ucuucacuuuagggggcuc

SEQ ID NO: 163340 - RNA, 19 nt, Artificial Sequence
  Description of Artificial Sequence: Synthetic oligonucleotide
cgcccuacccagggauucc

SEQ ID NO: 163341 - RNA, 19 nt, Artificial Sequence
  Description of Artificial Sequence: Synthetic oligonucleotide
ccguggaggaacuuuuuaa

SEQ ID NO: 163342 - RNA, 19 nt, Artificial Sequence
  Description of Artificial Sequence: Synthetic oligonucleotide
agcugcugaaggaaggaca

SEQ ID NO: 163343 - RNA, 19 nt, Artificial Sequence
  Description of Artificial Sequence: Synthetic oligonucleotide
acagaauggauaagccagc

SEQ ID NO: 163344 - RNA, 19 nt, Artificial Sequence
  Description of Artificial Sequence: Synthetic oligonucleotide
ccaacugcaccaacgaacu

SEQ ID NO: 163345 - RNA, 19 nt, Artificial Sequence
  Description of Artificial Sequence: Synthetic oligonucleotide
uguacaugaugaugaggga

SEQ ID NO: 163346 - RNA, 19 nt, Artificial Sequence
  Description of Artificial Sequence: Synthetic oligonucleotide
acuguuggcaugcagugcc

SEQ ID NO: 163347 - RNA, 19 nt, Artificial Sequence
  Description of Artificial Sequence: Synthetic oligonucleotide
ccucccagagaccaacguu

SEQ ID NO: 163348 - RNA, 19 nt, Artificial Sequence
  Description of Artificial Sequence: Synthetic oligonucleotide
ucaagcaguugguagaaga

SEQ ID NO: 163349 - RNA, 19 nt, Artificial Sequence
  Description of Artificial Sequence: Synthetic oligonucleotide
acuuggaucgaauucucac

SEQ ID NO: 163350 - RNA, 19 nt, Artificial Sequence
  Description of Artificial Sequence: Synthetic oligonucleotide
cucucacaaccaaugagga

SEQ ID NO: 163351 - RNA, 19 nt, Artificial Sequence
  Description of Artificial Sequence: Synthetic oligonucleotide
aauacuuggaccucagcca

SEQ ID NO: 163352 - RNA, 19 nt, Artificial Sequence
  Description of Artificial Sequence: Synthetic oligonucleotide
aaccucucgaacaguauuc

SEQ ID NO: 163353 - RNA, 19 nt, Artificial Sequence
  Description of Artificial Sequence: Synthetic oligonucleotide
caccuaguuacccugacac

SEQ ID NO: 163354 - RNA, 19 nt, Artificial Sequence
  Description of Artificial Sequence: Synthetic oligonucleotide
caagaaguucuuguucuuc

SEQ ID NO: 163355 - RNA, 19 nt, Artificial Sequence
  Description of Artificial Sequence: Synthetic oligonucleotide
caggagaugauucuguuuu

SEQ ID NO: 163356 - RNA, 19 nt, Artificial Sequence
  Description of Artificial Sequence: Synthetic oligonucleotide
uuucuccagaccccaugcc

SEQ ID NO: 163357 - RNA, 19 nt, Artificial Sequence
  Description of Artificial Sequence: Synthetic oligonucleotide
cuuacgaaccaugccuucc

SEQ ID NO: 163358 - RNA, 19 nt, Artificial Sequence
  Description of Artificial Sequence: Synthetic oligonucleotide
cucaguauccacacauaaa

SEQ ID NO: 163359 - RNA, 19 nt, Artificial Sequence
  Description of Artificial Sequence: Synthetic oligonucleotide
acggcaguguuaaaacaug

SEQ ID NO: 163360 - RNA, 19 nt, Artificial Sequence
  Description of Artificial Sequence: Synthetic oligonucleotide
gaaugacugugucugccug

SEQ ID NO: 163361 - RNA, 19 nt, Artificial Sequence
  Description of Artificial Sequence: Synthetic oligonucleotide
guccccaaacaggacagca

SEQ ID NO: 163362 - RNA, 19 nt, Artificial Sequence
  Description of Artificial Sequence: Synthetic oligonucleotide
acugggaaccuagcuacac

SEQ ID NO: 163363 - RNA, 19 nt, Artificial Sequence
  Description of Artificial Sequence: Synthetic oligonucleotide
cugagcagggagaccaugc

SEQ ID NO: 163364 - RNA, 19 nt, Artificial Sequence
  Description of Artificial Sequence: Synthetic oligonucleotide
ccucccagagcuuguuguc

SEQ ID NO: 163365 - RNA, 19 nt, Artificial Sequence
  Description of Artificial Sequence: Synthetic oligonucleotide
cuccacuuguauauaugga

SEQ ID NO: 163366 - RNA, 19 nt, Artificial Sequence
  Description of Artificial Sequence: Synthetic oligonucleotide
aucagaggaguaaauaauu

SEQ ID NO: 163367 - RNA, 19 nt, Artificial Sequence
  Description of Artificial Sequence: Synthetic oligonucleotide
uggaaaaguaaucagcaua

SEQ ID NO: 163368 - RNA, 19 nt, Artificial Sequence
  Description of Artificial Sequence: Synthetic oligonucleotide
auguguaaagauuuauaca

SEQ ID NO: 163369 - RNA, 19 nt, Artificial Sequence
  Description of Artificial Sequence: Synthetic oligonucleotide
aguugaaaacuuguaaucu

SEQ ID NO: 163370 - RNA, 19 nt, Artificial Sequence
  Description of Artificial Sequence: Synthetic oligonucleotide
uuccccaggaggagaagaa

SEQ ID NO: 163371 - RNA, 19 nt, Artificial Sequence
  Description of Artificial Sequence: Synthetic oligonucleotide
agguuucuggagcagugga

SEQ ID NO: 163372 - RNA, 19 nt, Artificial Sequence
  Description of Artificial Sequence: Synthetic oligonucleotide
acugccacaagccaccaug

SEQ ID NO: 163373 - RNA, 19 nt, Artificial Sequence
  Description of Artificial Sequence: Synthetic oligonucleotide
guaaccccucucaccugcc

SEQ ID NO: 163374 - RNA, 19 nt, Artificial Sequence
  Description of Artificial Sequence: Synthetic oligonucleotide
cgugcguacuggcugugga

SEQ ID NO: 163375 - RNA, 19 nt, Artificial Sequence
  Description of Artificial Sequence: Synthetic oligonucleotide
accaguaggacucaaggug

SEQ ID NO: 163376 - RNA, 19 nt, Artificial Sequence
  Description of Artificial Sequence: Synthetic oligonucleotide
ggacgugcguucugccuuc

SEQ ID NO: 163377 - RNA, 19 nt, Artificial Sequence
  Description of Artificial Sequence: Synthetic oligonucleotide
ccuuguuaauuuuguaaua

SEQ ID NO: 163378 - RNA, 19 nt, Artificial Sequence
  Description of Artificial Sequence: Synthetic oligonucleotide
aauuggagaagauuuaugu

SEQ ID NO: 163379 - RNA, 19 nt, Artificial Sequence
  Description of Artificial Sequence: Synthetic oligonucleotide
ucagcacacacuuacagag

SEQ ID NO: 163380 - RNA, 19 nt, Artificial Sequence
  Description of Artificial Sequence: Synthetic oligonucleotide
gcacaaaugcaguauauag

SEQ ID NO: 163381 - RNA, 19 nt, Artificial Sequence
  Description of Artificial Sequence: Synthetic oligonucleotide
ggugcuggauguauguaaa

SEQ ID NO: 163382 - RNA, 19 nt, Artificial Sequence
  Description of Artificial Sequence: Synthetic oligonucleotide
auauauucaaauuauguau

SEQ ID NO: 163383 - RNA, 19 nt, Artificial Sequence
  Description of Artificial Sequence: Synthetic oligonucleotide
uaaauauauauuauauauu

SEQ ID NO: 163384 - RNA, 19 nt, Artificial Sequence
  Description of Artificial Sequence: Synthetic oligonucleotide
uuacaaggaguuauuuuuu

SEQ ID NO: 163385 - RNA, 19 nt, Artificial Sequence
  Description of Artificial Sequence: Synthetic oligonucleotide
uguauugauuuuaaaugga

SEQ ID NO: 163386 - RNA, 19 nt, Artificial Sequence
  Description of Artificial Sequence: Synthetic oligonucleotide
augucccaaugcaccuaga

SEQ ID NO: 163387 - RNA, 19 nt, Artificial Sequence
  Description of Artificial Sequence: Synthetic oligonucleotide
aaaauuggucucucuuuuu

SEQ ID NO: 163388 - RNA, 19 nt, Artificial Sequence
  Description of Artificial Sequence: Synthetic oligonucleotide
uuuaauagcuauuugcuaa

SEQ ID NO: 163389 - RNA, 19 nt, Artificial Sequence
  Description of Artificial Sequence: Synthetic oligonucleotide
aaugcuguucuuacacaua

SEQ ID NO: 163390 - RNA, 19 nt, Artificial Sequence
  Description of Artificial Sequence: Synthetic oligonucleotide
aauuucuuaauuuucaccg

SEQ ID NO: 163391 - RNA, 19 nt, Artificial Sequence
  Description of Artificial Sequence: Synthetic oligonucleotide
gagcagagguggaaaaaua

SEQ ID NO: 163392 - RNA, 19 nt, Artificial Sequence
  Description of Artificial Sequence: Synthetic oligonucleotide
acuuuugcuuucagggaaa

SEQ ID NO: 163393 - RNA, 19 nt, Artificial Sequence
  Description of Artificial Sequence: Synthetic oligonucleotide
aaugguauaacguuaauuu

SEQ ID NO: 163394 - RNA, 19 nt, Artificial Sequence
  Description of Artificial Sequence: Synthetic oligonucleotide
uauuaauaaauugguaaua

SEQ ID NO: 163395 - RNA, 19 nt, Artificial Sequence
  Description of Artificial Sequence: Synthetic oligonucleotide
auacaaaacaauuaaucau

SEQ ID NO: 163396 - RNA, 19 nt, Artificial Sequence
  Description of Artificial Sequence: Synthetic oligonucleotide
uuuauaguuuuuuuuguaa

SEQ ID NO: 163397 - RNA, 19 nt, Artificial Sequence
  Description of Artificial Sequence: Synthetic oligonucleotide
auuuaaguggcauuucuau

SEQ ID NO: 163398 - RNA, 19 nt, Artificial Sequence
  Description of Artificial Sequence: Synthetic oligonucleotide
ugcaggcagcacagcagac

SEQ ID NO: 163399 - RNA, 19 nt, Artificial Sequence
  Description of Artificial Sequence: Synthetic oligonucleotide
cuaguuaaucuauugcuug

SEQ ID NO: 163400 - RNA, 19 nt, Artificial Sequence
  Description of Artificial Sequence: Synthetic oligonucleotide
ggacuuaacuaguuaucag

SEQ ID NO: 163401 - RNA, 19 nt, Artificial Sequence
  Description of Artificial Sequence: Synthetic oligonucleotide
gauccuuugaaaagagaau

SEQ ID NO: 163402 - RNA, 19 nt, Artificial Sequence
  Description of Artificial Sequence: Synthetic oligonucleotide
uauuuacaauauaugacua

SEQ ID NO: 163403 - RNA, 19 nt, Artificial Sequence
  Description of Artificial Sequence: Synthetic oligonucleotide
aauuuggggaaaaugaagu

SEQ ID NO: 163404 - RNA, 19 nt, Artificial Sequence
  Description of Artificial Sequence: Synthetic oligonucleotide
uuuugauuuauuuguguuu

SEQ ID NO: 163405 - RNA, 19 nt, Artificial Sequence
  Description of Artificial Sequence: Synthetic oligonucleotide
uaaaugcugcugucagacg

SEQ ID NO: 163406 - RNA, 19 nt, Artificial Sequence
  Description of Artificial Sequence: Synthetic oligonucleotide
gauuguucuuagaccuccu

SEQ ID NO: 163407 - RNA, 19 nt, Artificial Sequence
  Description of Artificial Sequence: Synthetic oligonucleotide
uaaaugccccauauuaaaa

SEQ ID NO: 163408 - RNA, 19 nt, Artificial Sequence
  Description of Artificial Sequence: Synthetic oligonucleotide
agaacucauucauaggaag

SEQ ID NO: 163409 - RNA, 19 nt, Artificial Sequence
  Description of Artificial Sequence: Synthetic oligonucleotide
gguguuucauuuuggugug

SEQ ID NO: 163410 - RNA, 19 nt, Artificial Sequence
  Description of Artificial Sequence: Synthetic oligonucleotide
gcaacccugucauuacguc

SEQ ID NO: 163411 - RNA, 19 nt, Artificial Sequence
  Description of Artificial Sequence: Synthetic oligonucleotide
caacgcaacgucuaacugg

SEQ ID NO: 163412 - RNA, 19 nt, Artificial Sequence
  Description of Artificial Sequence: Synthetic oligonucleotide
gacuucccaagauaaaugg

SEQ ID NO: 163413 - RNA, 19 nt, Artificial Sequence
  Description of Artificial Sequence: Synthetic oligonucleotide
guaccagcguccucuuaaa

SEQ ID NO: 163414 - RNA, 19 nt, Artificial Sequence
  Description of Artificial Sequence: Synthetic oligonucleotide
aagaugccuuaauccauuc

SEQ ID NO: 163415 - RNA, 19 nt, Artificial Sequence
  Description of Artificial Sequence: Synthetic oligonucleotide
ccuugaggacagaccuuag

SEQ ID NO: 163416 - RNA, 19 nt, Artificial Sequence
  Description of Artificial Sequence: Synthetic oligonucleotide
guugaaaugauagcagaau

SEQ ID NO: 163417 - RNA, 19 nt, Artificial Sequence
  Description of Artificial Sequence: Synthetic oligonucleotide
ugugcuucucucuggcagc

SEQ ID NO: 163418 - RNA, 19 nt, Artificial Sequence
  Description of Artificial Sequence: Synthetic oligonucleotide
cuggccuucugcuucugag

SEQ ID NO: 163419 - RNA, 19 nt, Artificial Sequence
  Description of Artificial Sequence: Synthetic oligonucleotide
guugcacauuaaucagauu

SEQ ID NO: 163420 - RNA, 19 nt, Artificial Sequence
  Description of Artificial Sequence: Synthetic oligonucleotide
uagccuguauucucuucag

SEQ ID NO: 163421 - RNA, 19 nt, Artificial Sequence
  Description of Artificial Sequence: Synthetic oligonucleotide
gugaauuuugauaauggcu

SEQ ID NO: 163422 - RNA, 19 nt, Artificial Sequence
  Description of Artificial Sequence: Synthetic oligonucleotide
uuccagacucuuuggcguu

SEQ ID NO: 163423 - RNA, 19 nt, Artificial Sequence
  Description of Artificial Sequence: Synthetic oligonucleotide
uggagacgccuguuaggau

SEQ ID NO: 163424 - RNA, 19 nt, Artificial Sequence
  Description of Artificial Sequence: Synthetic oligonucleotide
ucuucaagucccaucauag

SEQ ID NO: 163425 - RNA, 19 nt, Artificial Sequence
  Description of Artificial Sequence: Synthetic oligonucleotide
gaaaauugaaacacagagu

SEQ ID NO: 163426 - RNA, 19 nt, Artificial Sequence
  Description of Artificial Sequence: Synthetic oligonucleotide
uuguucugcugauaguuuu

SEQ ID NO: 163427 - RNA, 19 nt, Artificial Sequence
  Description of Artificial Sequence: Synthetic oligonucleotide
uggggauacguccaucuuu

SEQ ID NO: 163428 - RNA, 19 nt, Artificial Sequence
  Description of Artificial Sequence: Synthetic oligonucleotide
uuuaagggauugcuuucau

SEQ ID NO: 163429 - RNA, 19 nt, Artificial Sequence
  Description of Artificial Sequence: Synthetic oligonucleotide
ucuaauucuggcaggaccu

SEQ ID NO: 163430 - RNA, 19 nt, Artificial Sequence
  Description of Artificial Sequence: Synthetic oligonucleotide
ucaccaaaagauccagccu

SEQ ID NO: 163431 - RNA, 19 nt, Artificial Sequence
  Description of Artificial Sequence: Synthetic oligonucleotide
ucauaccuacaucagacaa

SEQ ID NO: 163432 - RNA, 19 nt, Artificial Sequence
  Description of Artificial Sequence: Synthetic oligonucleotide
aaauaucgccguuguuccu

SEQ ID NO: 163433 - RNA, 19 nt, Artificial Sequence
  Description of Artificial Sequence: Synthetic oligonucleotide
uucuguacuaaaguauugu

SEQ ID NO: 163434 - RNA, 19 nt, Artificial Sequence
  Description of Artificial Sequence: Synthetic oligonucleotide
uguuuugcuuuggaaacac

SEQ ID NO: 163435 - RNA, 19 nt, Artificial Sequence
  Description of Artificial Sequence: Synthetic oligonucleotide
cccacucacuuugcaauag

SEQ ID NO: 163436 - RNA, 19 nt, Artificial Sequence
  Description of Artificial Sequence: Synthetic oligonucleotide
gccgugcaagaugaaugca

SEQ ID NO: 163437 - RNA, 19 nt, Artificial Sequence
  Description of Artificial Sequence: Synthetic oligonucleotide
agauuacacugaucuuaug

SEQ ID NO: 163438 - RNA, 19 nt, Artificial Sequence
  Description of Artificial Sequence: Synthetic oligonucleotide
guguuacaaaauuggagaa

SEQ ID NO: 163439 - RNA, 19 nt, Artificial Sequence
  Description of Artificial Sequence: Synthetic oligonucleotide
aaguauuuaauaaaaccug

SEQ ID NO: 163440 - RNA, 19 nt, Artificial Sequence
  Description of Artificial Sequence: Synthetic oligonucleotide
guuaauuuuuauacugaca

SEQ ID NO: 163441 - RNA, 19 nt, Artificial Sequence
  Description of Artificial Sequence: Synthetic oligonucleotide
aauaaaaauguuucuacag

SEQ ID NO: 163442 - RNA, 19 nt, Artificial Sequence
  Description of Artificial Sequence: Synthetic oligonucleotide
gauauuaauguuaacaaga

SEQ ID NO: 163443 - RNA, 19 nt, Artificial Sequence
  Description of Artificial Sequence: Synthetic oligonucleotide
acaaaauaaaugucacgca

SEQ ID NO: 163444 - RNA, 25 nt, Artificial Sequence
  Description of Artificial Sequence: Synthetic oligonucleotide
ggcggcggcuggaggagagcgcggu

SEQ ID NO: 163445 - RNA, 25 nt, Artificial Sequence
  Description of Artificial Sequence: Synthetic oligonucleotide
uggagagccgagcgggcgggcggcg

SEQ ID NO: 163446 - RNA, 25 nt, Artificial Sequence
  Description of Artificial Sequence: Synthetic oligonucleotide
gggugcggagcgggcgagggagcgc

SEQ ID NO: 163447 - RNA, 25 nt, Artificial Sequence
  Description of Artificial Sequence: Synthetic oligonucleotide
cgcgcggccgccacaaagcucgggc

SEQ ID NO: 163448 - RNA, 25 nt, Artificial Sequence
  Description of Artificial Sequence: Synthetic oligonucleotide
cgccgcggggcugcaugcggcguac

SEQ ID NO: 163449 - RNA, 25 nt, Artificial Sequence
  Description of Artificial Sequence: Synthetic oligonucleotide
ccuggcccggcgcggcgacugcucu

SEQ ID NO: 163450 - RNA, 25 nt, Artificial Sequence
  Description of Artificial Sequence: Synthetic oligonucleotide
uccgggcuggcgggggccggccgcg

SEQ ID NO: 163451 - RNA, 25 nt, Artificial Sequence
  Description of Artificial Sequence: Synthetic oligonucleotide
gagccccgggggccccgaggccgca

SEQ ID NO: 163452 - RNA, 25 nt, Artificial Sequence
  Description of Artificial Sequence: Synthetic oligonucleotide
agcuugccugcgcgcucugagccuu

SEQ ID NO: 163453 - RNA, 25 nt, Artificial Sequence
  Description of Artificial Sequence: Synthetic oligonucleotide
ucgcaacucgcgagcaaaguuuggu

SEQ ID NO: 163454 - RNA, 25 nt, Artificial Sequence
  Description of Artificial Sequence: Synthetic oligonucleotide
uggaggcaacgccaagccugagucc

SEQ ID NO: 163455 - RNA, 25 nt, Artificial Sequence
  Description of Artificial Sequence: Synthetic oligonucleotide
cuuucuuccucucguuccccaaauc

SEQ ID NO: 163456 - RNA, 25 nt, Artificial Sequence
  Description of Artificial Sequence: Synthetic oligonucleotide
ccgagggcagcccgcgggcgucaug

SEQ ID NO: 163457 - RNA, 25 nt, Artificial Sequence
  Description of Artificial Sequence: Synthetic oligonucleotide
gcccgcgcuccuccgcagccugggg

SEQ ID NO: 163458 - RNA, 25 nt, Artificial Sequence
  Description of Artificial Sequence: Synthetic oligonucleotide
guacgcgugaagcccgggaggcuug

SEQ ID NO: 163459 - RNA, 25 nt, Artificial Sequence
  Description of Artificial Sequence: Synthetic oligonucleotide
ggcgccggcgaagacccaaggacca

SEQ ID NO: 163460 - RNA, 25 nt, Artificial Sequence
  Description of Artificial Sequence: Synthetic oligonucleotide
acucuucugcguuuggaguugcucc

SEQ ID NO: 163461 - RNA, 25 nt, Artificial Sequence
  Description of Artificial Sequence: Synthetic oligonucleotide
cccgcaaccccgggcucgucgcuuu

SEQ ID NO: 163462 - RNA, 25 nt, Artificial Sequence
  Description of Artificial Sequence: Synthetic oligonucleotide
ucuccaucccgacccacgcggggcg

SEQ ID NO: 163463 - RNA, 25 nt, Artificial Sequence
  Description of Artificial Sequence: Synthetic oligonucleotide
gcggggacaacacaggucgcggagg

SEQ ID NO: 163464 - RNA, 25 nt, Artificial Sequence
  Description of Artificial Sequence: Synthetic oligonucleotide
gagcguugccauucaagugacugca

SEQ ID NO: 163465 - RNA, 25 nt, Artificial Sequence
  Description of Artificial Sequence: Synthetic oligonucleotide
agcagcagcggcagcgccucgguuc

SEQ ID NO: 163466 - RNA, 25 nt, Artificial Sequence
  Description of Artificial Sequence: Synthetic oligonucleotide
ccugagcccaccgcaggcugaaggc

SEQ ID NO: 163467 - RNA, 25 nt, Artificial Sequence
  Description of Artificial Sequence: Synthetic oligonucleotide
cauugcgcguaguccaugcccguag

SEQ ID NO: 163468 - RNA, 25 nt, Artificial Sequence
  Description of Artificial Sequence: Synthetic oligonucleotide
gaggaagugugcagaugggauuaac

SEQ ID NO: 163469 - RNA, 25 nt, Artificial Sequence
  Description of Artificial Sequence: Synthetic oligonucleotide
cguccacauggagauauggaagagg

SEQ ID NO: 163470 - RNA, 25 nt, Artificial Sequence
  Description of Artificial Sequence: Synthetic oligonucleotide
gaccggggauugguaccguaaccau

SEQ ID NO: 163471 - RNA, 25 nt, Artificial Sequence
  Description of Artificial Sequence: Synthetic oligonucleotide
uggucagcuggggucguuucaucug

SEQ ID NO: 163472 - RNA, 25 nt, Artificial Sequence
  Description of Artificial Sequence: Synthetic oligonucleotide
gccuggucguggucaccauggcaac

SEQ ID NO: 163473 - RNA, 25 nt, Artificial Sequence
  Description of Artificial Sequence: Synthetic oligonucleotide
ccuugucccuggcccggcccuccuu

SEQ ID NO: 163474 - RNA, 25 nt, Artificial Sequence
  Description of Artificial Sequence: Synthetic oligonucleotide
ucaguuuaguugaggauaccacauu

SEQ ID NO: 163475 - RNA, 25 nt, Artificial Sequence
  Description of Artificial Sequence: Synthetic oligonucleotide
uagagccagaagagccaccaaccaa

SEQ ID NO: 163476 - RNA, 25 nt, Artificial Sequence
  Description of Artificial Sequence: Synthetic oligonucleotide
aauaccaaaucucucaaccagaagu

SEQ ID NO: 163477 - RNA, 25 nt, Artificial Sequence
  Description of Artificial Sequence: Synthetic oligonucleotide
uguacguggcugcgccaggggaguc

SEQ ID NO: 163478 - RNA, 25 nt, Artificial Sequence
  Description of Artificial Sequence: Synthetic oligonucleotide
cgcuagaggugcgcugccuguugaa

SEQ ID NO: 163479 - RNA, 25 nt, Artificial Sequence
  Description of Artificial Sequence: Synthetic oligonucleotide
aagaugccgccgugaucaguuggac

SEQ ID NO: 163480 - RNA, 25 nt, Artificial Sequence
  Description of Artificial Sequence: Synthetic oligonucleotide
cuaaggauggggugcacuuggggcc

SEQ ID NO: 163481 - RNA, 25 nt, Artificial Sequence
  Description of Artificial Sequence: Synthetic oligonucleotide
ccaacaauaggacagugcuuauugg

SEQ ID NO: 163482 - RNA, 25 nt, Artificial Sequence
  Description of Artificial Sequence: Synthetic oligonucleotide
gggaguacuugcagauaaagggcgc

SEQ ID NO: 163483 - RNA, 25 nt, Artificial Sequence
  Description of Artificial Sequence: Synthetic oligonucleotide
ccacgccuagagacuccggccucua

SEQ ID NO: 163484 - RNA, 25 nt, Artificial Sequence
  Description of Artificial Sequence: Synthetic oligonucleotide
augcuuguacugccaguaggacugu

SEQ ID NO: 163485 - RNA, 25 nt, Artificial Sequence
  Description of Artificial Sequence: Synthetic oligonucleotide
uagacagugaaacuugguacuucau

SEQ ID NO: 163486 - RNA, 25 nt, Artificial Sequence
  Description of Artificial Sequence: Synthetic oligonucleotide
uggugaaugucacagaugccaucuc

SEQ ID NO: 163487 - RNA, 25 nt, Artificial Sequence
  Description of Artificial Sequence: Synthetic oligonucleotide
cauccggagaugaugaggaugacac

SEQ ID NO: 163488 - RNA, 25 nt, Artificial Sequence
  Description of Artificial Sequence: Synthetic oligonucleotide
ccgauggugcggaagauuuugucag

SEQ ID NO: 163489 - RNA, 25 nt, Artificial Sequence
  Description of Artificial Sequence: Synthetic oligonucleotide
gugagaacaguaacaacaagagagc

SEQ ID NO: 163490 - RNA, 25 nt, Artificial Sequence
  Description of Artificial Sequence: Synthetic oligonucleotide
caccauacuggaccaacacagaaaa

SEQ ID NO: 163491 - RNA, 25 nt, Artificial Sequence
  Description of Artificial Sequence: Synthetic oligonucleotide
agauggaaaagcggcuccaugcugu

SEQ ID NO: 163492 - RNA, 25 nt, Artificial Sequence
  Description of Artificial Sequence: Synthetic oligonucleotide
ugccugcggccaacacugucaaguu

SEQ ID NO: 163493 - RNA, 25 nt, Artificial Sequence
  Description of Artificial Sequence: Synthetic oligonucleotide
uucgcugcccagccggggggaaccc

SEQ ID NO: 163494 - RNA, 25 nt, Artificial Sequence
  Description of Artificial Sequence: Synthetic oligonucleotide
caaugccaaccaugcgguggcugaa

SEQ ID NO: 163495 - RNA, 25 nt, Artificial Sequence
  Description of Artificial Sequence: Synthetic oligonucleotide
aaaacgggaaggaguuuaagcagga

SEQ ID NO: 163496 - RNA, 25 nt, Artificial Sequence
  Description of Artificial Sequence: Synthetic oligonucleotide
agcaucgcauuggaggcuacaaggu

SEQ ID NO: 163497 - RNA, 25 nt, Artificial Sequence
  Description of Artificial Sequence: Synthetic oligonucleotide
uacgaaaccagcacuggagccucau

SEQ ID NO: 163498 - RNA, 25 nt, Artificial Sequence
  Description of Artificial Sequence: Synthetic oligonucleotide
uuauggaaaguguggucccaucuga

SEQ ID NO: 163499 - RNA, 25 nt, Artificial Sequence
  Description of Artificial Sequence: Synthetic oligonucleotide
acaagggaaauuauaccuguguagu

SEQ ID NO: 163500 - RNA, 25 nt, Artificial Sequence
  Description of Artificial Sequence: Synthetic oligonucleotide
uggagaaugaauacggguccaucaa

SEQ ID NO: 163501 - RNA, 25 nt, Artificial Sequence
  Description of Artificial Sequence: Synthetic oligonucleotide
aucacacguaccaccuggauguugu

SEQ ID NO: 163502 - RNA, 25 nt, Artificial Sequence
  Description of Artificial Sequence: Synthetic oligonucleotide
uggagcgaucgccucaccggcccau

SEQ ID NO: 163503 - RNA, 25 nt, Artificial Sequence
  Description of Artificial Sequence: Synthetic oligonucleotide
uccuccaagccggacugccggcaaa

SEQ ID NO: 163504 - RNA, 25 nt, Artificial Sequence
  Description of Artificial Sequence: Synthetic oligonucleotide
augccuccacaguggucggaggaga

SEQ ID NO: 163505 - RNA, 25 nt, Artificial Sequence
  Description of Artificial Sequence: Synthetic oligonucleotide
acguagaguuugucugcaagguuua

SEQ ID NO: 163506 - RNA, 25 nt, Artificial Sequence
  Description of Artificial Sequence: Synthetic oligonucleotide
acagugaugcccagccccacaucca

SEQ ID NO: 163507 - RNA, 25 nt, Artificial Sequence
  Description of Artificial Sequence: Synthetic oligonucleotide
aguggaucaagcacguggaaaagaa

SEQ ID NO: 163508 - RNA, 25 nt, Artificial Sequence
  Description of Artificial Sequence: Synthetic oligonucleotide
acggcaguaaauacgggcccgacgg

SEQ ID NO: 163509 - RNA, 25 nt, Artificial Sequence
  Description of Artificial Sequence: Synthetic oligonucleotide
ggcugcccuaccucaagguucucaa

SEQ ID NO: 163510 - RNA, 25 nt, Artificial Sequence
  Description of Artificial Sequence: Synthetic oligonucleotide
aggccgccgguguuaacaccacgga

SEQ ID NO: 163511 - RNA, 25 nt, Artificial Sequence
  Description of Artificial Sequence: Synthetic oligonucleotide
acaaagagauugagguucucuauau

SEQ ID NO: 163512 - RNA, 25 nt, Artificial Sequence
  Description of Artificial Sequence: Synthetic oligonucleotide
uucggaauguaacuuuugaggacgc

SEQ ID NO: 163513 - RNA, 25 nt, Artificial Sequence
  Description of Artificial Sequence: Synthetic oligonucleotide
cuggggaauauacgugcuuggcggg

SEQ ID NO: 163514 - RNA, 25 nt, Artificial Sequence
  Description of Artificial Sequence: Synthetic oligonucleotide
guaauucuauugggauauccuuuca

SEQ ID NO: 163515 - RNA, 25 nt, Artificial Sequence
  Description of Artificial Sequence: Synthetic oligonucleotide
acucugcaugguugacaguucugcc

SEQ ID NO: 163516 - RNA, 25 nt, Artificial Sequence
  Description of Artificial Sequence: Synthetic oligonucleotide
cagcgccuggaagagaaaaggagau

SEQ ID NO: 163517 - RNA, 25 nt, Artificial Sequence
  Description of Artificial Sequence: Synthetic oligonucleotide
uuacagcuuccccagacuaccugga

SEQ ID NO: 163518 - RNA, 25 nt, Artificial Sequence
  Description of Artificial Sequence: Synthetic oligonucleotide
agauagccauuuacugcauaggggu

SEQ ID NO: 163519 - RNA, 25 nt, Artificial Sequence
  Description of Artificial Sequence: Synthetic oligonucleotide
ucuucuuaaucgccuguaugguggu

SEQ ID NO: 163520 - RNA, 25 nt, Artificial Sequence
  Description of Artificial Sequence: Synthetic oligonucleotide
uaacagucauccugugccgaaugaa

SEQ ID NO: 163521 - RNA, 25 nt, Artificial Sequence
  Description of Artificial Sequence: Synthetic oligonucleotide
agaacacgaccaagaagccagacuu

SEQ ID NO: 163522 - RNA, 25 nt, Artificial Sequence
  Description of Artificial Sequence: Synthetic oligonucleotide
ucagcagccagccggcugugcacaa

SEQ ID NO: 163523 - RNA, 25 nt, Artificial Sequence
  Description of Artificial Sequence: Synthetic oligonucleotide
agcugaccaaacguaucccccugcg

SEQ ID NO: 163524 - RNA, 25 nt, Artificial Sequence
  Description of Artificial Sequence: Synthetic oligonucleotide
ggagacagguaacaguuucggcuga

SEQ ID NO: 163525 - RNA, 25 nt, Artificial Sequence
  Description of Artificial Sequence: Synthetic oligonucleotide
aguccagcuccuccaugaacuccaa

SEQ ID NO: 163526 - RNA, 25 nt, Artificial Sequence
  Description of Artificial Sequence: Synthetic oligonucleotide
acaccccgcuggugaggauaacaac

SEQ ID NO: 163527 - RNA, 25 nt, Artificial Sequence
  Description of Artificial Sequence: Synthetic oligonucleotide
cacgccucucuucaacggcagacac

SEQ ID NO: 163528 - RNA, 25 nt, Artificial Sequence
  Description of Artificial Sequence: Synthetic oligonucleotide
cccccaugcuggcaggggucuccga

SEQ ID NO: 163529 - RNA, 25 nt, Artificial Sequence
  Description of Artificial Sequence: Synthetic oligonucleotide
aguaugaacuuccagaggacccaaa

SEQ ID NO: 163530 - RNA, 25 nt, Artificial Sequence
  Description of Artificial Sequence: Synthetic oligonucleotide
aaugggaguuuccaagagauaagcu

SEQ ID NO: 163531 - RNA, 25 nt, Artificial Sequence
  Description of Artificial Sequence: Synthetic oligonucleotide
ugacacugggcaagccccugggaga

SEQ ID NO: 163532 - RNA, 25 nt, Artificial Sequence
  Description of Artificial Sequence: Synthetic oligonucleotide
aagguugcuuugggcaaguggucau

SEQ ID NO: 163533 - RNA, 25 nt, Artificial Sequence
  Description of Artificial Sequence: Synthetic oligonucleotide
uggcggaagcagugggaauugacaa

SEQ ID NO: 163534 - RNA, 25 nt, Artificial Sequence
  Description of Artificial Sequence: Synthetic oligonucleotide
aagacaagcccaaggaggcggucac

SEQ ID NO: 163535 - RNA, 25 nt, Artificial Sequence
  Description of Artificial Sequence: Synthetic oligonucleotide
ccguggccgugaagauguugaaaga

SEQ ID NO: 163536 - RNA, 25 nt, Artificial Sequence
  Description of Artificial Sequence: Synthetic oligonucleotide
augaugccacagagaaagaccuuuc

SEQ ID NO: 163537 - RNA, 25 nt, Artificial Sequence
  Description of Artificial Sequence: Synthetic oligonucleotide
cugaucuggugucagagauggagau

SEQ ID NO: 163538 - RNA, 25 nt, Artificial Sequence
  Description of Artificial Sequence: Synthetic oligonucleotide
ugaugaagaugauugggaaacacaa

SEQ ID NO: 163539 - RNA, 25 nt, Artificial Sequence
  Description of Artificial Sequence: Synthetic oligonucleotide
agaauaucauaaaucuucuuggagc

SEQ ID NO: 163540 - RNA, 25 nt, Artificial Sequence
  Description of Artificial Sequence: Synthetic oligonucleotide
ccugcacacaggaugggccucucua

SEQ ID NO: 163541 - RNA, 25 nt, Artificial Sequence
  Description of Artificial Sequence: Synthetic oligonucleotide
augucauaguugaguaugccucuaa

SEQ ID NO: 163542 - RNA, 25 nt, Artificial Sequence
  Description of Artificial Sequence: Synthetic oligonucleotide
aaggcaaccuccgagaauaccuccg

SEQ ID NO: 163543 - RNA, 25 nt, Artificial Sequence
  Description of Artificial Sequence: Synthetic oligonucleotide
gagcccggaggccacccgggaugga

SEQ ID NO: 163544 - RNA, 25 nt, Artificial Sequence
  Description of Artificial Sequence: Synthetic oligonucleotide
aguacuccuaugacauuaaccgugu

SEQ ID NO: 163545 - RNA, 25 nt, Artificial Sequence
  Description of Artificial Sequence: Synthetic oligonucleotide
uuccugaggagcagaugaccuucaa

SEQ ID NO: 163546 - RNA, 25 nt, Artificial Sequence
  Description of Artificial Sequence: Synthetic oligonucleotide
aggacuuggugucaugcaccuacca

SEQ ID NO: 163547 - RNA, 25 nt, Artificial Sequence
  Description of Artificial Sequence: Synthetic oligonucleotide
agcuggccagaggcauggaguacuu

SEQ ID NO: 163548 - RNA, 25 nt, Artificial Sequence
  Description of Artificial Sequence: Synthetic oligonucleotide
uggcuucccaaaaauguauucaucg

SEQ ID NO: 163549 - RNA, 25 nt, Artificial Sequence
  Description of Artificial Sequence: Synthetic oligonucleotide
gagauuuagcagccagaaauguuuu

SEQ ID NO: 163550 - RNA, 25 nt, Artificial Sequence
  Description of Artificial Sequence: Synthetic oligonucleotide
ugguaacagaaaacaaugugaugaa

SEQ ID NO: 163551 - RNA, 25 nt, Artificial Sequence
  Description of Artificial Sequence: Synthetic oligonucleotide
aaauagcagacuuuggacucgccag

SEQ ID NO: 163552 - RNA, 25 nt, Artificial Sequence
  Description of Artificial Sequence: Synthetic oligonucleotide
gagauaucaacaauauagacuauua

SEQ ID NO: 163553 - RNA, 25 nt, Artificial Sequence
  Description of Artificial Sequence: Synthetic oligonucleotide
acaaaaagaccaccaaugggcggcu

SEQ ID NO: 163554 - RNA, 25 nt, Artificial Sequence
  Description of Artificial Sequence: Synthetic oligonucleotide
uuccagucaaguggauggcuccaga

SEQ ID NO: 163555 - RNA, 25 nt, Artificial Sequence
  Description of Artificial Sequence: Synthetic oligonucleotide
aagcccuguuugauagaguauacac

SEQ ID NO: 163556 - RNA, 25 nt, Artificial Sequence
  Description of Artificial Sequence: Synthetic oligonucleotide
cucaucagagugaugucugguccuu

SEQ ID NO: 163557 - RNA, 25 nt, Artificial Sequence
  Description of Artificial Sequence: Synthetic oligonucleotide
ucgggguguuaaugugggagaucuu

SEQ ID NO: 163558 - RNA, 25 nt, Artificial Sequence
  Description of Artificial Sequence: Synthetic oligonucleotide
ucacuuuagggggcucgcccuaccc

SEQ ID NO: 163559 - RNA, 25 nt, Artificial Sequence
  Description of Artificial Sequence: Synthetic oligonucleotide
cagggauucccguggaggaacuuuu

SEQ ID NO: 163560 - RNA, 25 nt, Artificial Sequence
  Description of Artificial Sequence: Synthetic oligonucleotide
uuaagcugcugaaggaaggacacag

SEQ ID NO: 163561 - RNA, 25 nt, Artificial Sequence
  Description of Artificial Sequence: Synthetic oligonucleotide
gaauggauaagccagccaacugcac

SEQ ID NO: 163562 - RNA, 25 nt, Artificial Sequence
  Description of Artificial Sequence: Synthetic oligonucleotide
ccaacgaacuguacaugaugaugag

SEQ ID NO: 163563 - RNA, 25 nt, Artificial Sequence
  Description of Artificial Sequence: Synthetic oligonucleotide
gggacuguuggcaugcagugcccuc

SEQ ID NO: 163564 - RNA, 25 nt, Artificial Sequence
  Description of Artificial Sequence: Synthetic oligonucleotide
cccagagaccaacguucaagcaguu

SEQ ID NO: 163565 - RNA, 25 nt, Artificial Sequence
  Description of Artificial Sequence: Synthetic oligonucleotide
ugguagaagacuuggaucgaauucu

SEQ ID NO: 163566 - RNA, 25 nt, Artificial Sequence
  Description of Artificial Sequence: Synthetic oligonucleotide
ucacucucacaaccaaugaggaaua

SEQ ID NO: 163567 - RNA, 25 nt, Artificial Sequence
  Description of Artificial Sequence: Synthetic oligonucleotide
acuuggaccucagccaaccucucga

SEQ ID NO: 163568 - RNA, 25 nt, Artificial Sequence
  Description of Artificial Sequence: Synthetic oligonucleotide
aacaguauucaccuaguuacccuga

SEQ ID NO: 163569 - RNA, 25 nt, Artificial Sequence
  Description of Artificial Sequence: Synthetic oligonucleotide
acacaagaaguucuuguucuucagg

SEQ ID NO: 163570 - RNA, 25 nt, Artificial Sequence
  Description of Artificial Sequence: Synthetic oligonucleotide
gagaugauucuguuuuuucuccaga

SEQ ID NO: 163571 - RNA, 25 nt, Artificial Sequence
  Description of Artificial Sequence: Synthetic oligonucleotide
accccaugccuuacgaaccaugccu

SEQ ID NO: 163572 - RNA, 25 nt, Artificial Sequence
  Description of Artificial Sequence: Synthetic oligonucleotide
uuccucaguauccacacauaaacgg

SEQ ID NO: 163573 - RNA, 25 nt, Artificial Sequence
  Description of Artificial Sequence: Synthetic oligonucleotide
gcaguguuaaaacaugaaugacugu

SEQ ID NO: 163574 - RNA, 25 nt, Artificial Sequence
  Description of Artificial Sequence: Synthetic oligonucleotide
ugucugccuguccccaaacaggaca

SEQ ID NO: 163575 - RNA, 25 nt, Artificial Sequence
  Description of Artificial Sequence: Synthetic oligonucleotide
agcacugggaaccuagcuacacuga

SEQ ID NO: 163576 - RNA, 25 nt, Artificial Sequence
  Description of Artificial Sequence: Synthetic oligonucleotide
agcagggagaccaugccucccagag

SEQ ID NO: 163577 - RNA, 25 nt, Artificial Sequence
  Description of Artificial Sequence: Synthetic oligonucleotide
gcuuguugucuccacuuguauauau

SEQ ID NO: 163578 - RNA, 25 nt, Artificial Sequence
  Description of Artificial Sequence: Synthetic oligonucleotide
uggaucagaggaguaaauaauugga

SEQ ID NO: 163579 - RNA, 25 nt, Artificial Sequence
  Description of Artificial Sequence: Synthetic oligonucleotide
aaaaguaaucagcauauguguaaag

SEQ ID NO: 163580 - RNA, 25 nt, Artificial Sequence
  Description of Artificial Sequence: Synthetic oligonucleotide
gauuuauacaguugaaaacuuguaa

SEQ ID NO: 163581 - RNA, 25 nt, Artificial Sequence
  Description of Artificial Sequence: Synthetic oligonucleotide
aucuuccccaggaggagaagaaggu

SEQ ID NO: 163582 - RNA, 25 nt, Artificial Sequence
  Description of Artificial Sequence: Synthetic oligonucleotide
uuucuggagcaguggacugccacaa

SEQ ID NO: 163583 - RNA, 25 nt, Artificial Sequence
  Description of Artificial Sequence: Synthetic oligonucleotide
agccaccauguaaccccucucaccu

SEQ ID NO: 163584 - RNA, 25 nt, Artificial Sequence
  Description of Artificial Sequence: Synthetic oligonucleotide
ugccgugcguacuggcuguggacca

SEQ ID NO: 163585 - RNA, 25 nt, Artificial Sequence
  Description of Artificial Sequence: Synthetic oligonucleotide
aguaggacucaagguggacgugcgu

SEQ ID NO: 163586 - RNA, 25 nt, Artificial Sequence
  Description of Artificial Sequence: Synthetic oligonucleotide
uucugccuuccuuguuaauuuugua

SEQ ID NO: 163587 - RNA, 25 nt, Artificial Sequence
  Description of Artificial Sequence: Synthetic oligonucleotide
aauaauuggagaagauuuaugucag

SEQ ID NO: 163588 - RNA, 25 nt, Artificial Sequence
  Description of Artificial Sequence: Synthetic oligonucleotide
gcacacacuuacagagcacaaaugc

SEQ ID NO: 163589 - RNA, 25 nt, Artificial Sequence
  Description of Artificial Sequence: Synthetic oligonucleotide
caguauauaggugcuggauguaugu

SEQ ID NO: 163590 - RNA, 25 nt, Artificial Sequence
  Description of Artificial Sequence: Synthetic oligonucleotide
uaaauauauucaaauuauguauaaa

SEQ ID NO: 163591 - RNA, 25 nt, Artificial Sequence
  Description of Artificial Sequence: Synthetic oligonucleotide
auauauauuauauauuuacaaggag

SEQ ID NO: 163592 - RNA, 25 nt, Artificial Sequence
  Description of Artificial Sequence: Synthetic oligonucleotide
guuauuuuuuguauugauuuuaaau

SEQ ID NO: 163593 - RNA, 25 nt, Artificial Sequence
  Description of Artificial Sequence: Synthetic oligonucleotide
uggaugucccaaugcaccuagaaaa

SEQ ID NO: 163594 - RNA, 25 nt, Artificial Sequence
  Description of Artificial Sequence: Synthetic oligonucleotide
auuggucucucuuuuuuuaauagcu

SEQ ID NO: 163595 - RNA, 25 nt, Artificial Sequence
  Description of Artificial Sequence: Synthetic oligonucleotide
uauuugcuaaaugcuguucuuacac

SEQ ID NO: 163596 - RNA, 25 nt, Artificial Sequence
  Description of Artificial Sequence: Synthetic oligonucleotide
cauaauuucuuaauuuucaccgagc

SEQ ID NO: 163597 - RNA, 25 nt, Artificial Sequence
  Description of Artificial Sequence: Synthetic oligonucleotide
cagagguggaaaaauacuuuugcuu

SEQ ID NO: 163598 - RNA, 25 nt, Artificial Sequence
  Description of Artificial Sequence: Synthetic oligonucleotide
uucagggaaaaugguauaacguuaa

SEQ ID NO: 163599 - RNA, 25 nt, Artificial Sequence
  Description of Artificial Sequence: Synthetic oligonucleotide
auuuauuaauaaauugguaauauac

SEQ ID NO: 163600 - RNA, 25 nt, Artificial Sequence
  Description of Artificial Sequence: Synthetic oligonucleotide
caaaacaauuaaucauuuauaguuu

SEQ ID NO: 163601 - RNA, 25 nt, Artificial Sequence
  Description of Artificial Sequence: Synthetic oligonucleotide
uuuuuuguaauuuaaguggcauuuc

SEQ ID NO: 163602 - RNA, 25 nt, Artificial Sequence
  Description of Artificial Sequence: Synthetic oligonucleotide
cuaugcaggcagcacagcagacuag

SEQ ID NO: 163603 - RNA, 25 nt, Artificial Sequence
  Description of Artificial Sequence: Synthetic oligonucleotide
guuaaucuauugcuuggacuuaacu

SEQ ID NO: 163604 - RNA, 25 nt, Artificial Sequence
  Description of Artificial Sequence: Synthetic oligonucleotide
uaguuaucagauccuuugaaaagag

SEQ ID NO: 163605 - RNA, 25 nt, Artificial Sequence
  Description of Artificial Sequence: Synthetic oligonucleotide
gaauauuuacaauauaugacuaauu

SEQ ID NO: 163606 - RNA, 25 nt, Artificial Sequence
  Description of Artificial Sequence: Synthetic oligonucleotide
uuggggaaaaugaaguuuugauuua

SEQ ID NO: 163607 - RNA, 25 nt, Artificial Sequence
  Description of Artificial Sequence: Synthetic oligonucleotide
auuuguguuuaaaugcugcugucag

SEQ ID NO: 163608 - RNA, 25 nt, Artificial Sequence
  Description of Artificial Sequence: Synthetic oligonucleotide
gacgauuguucuuagaccuccuaaa

SEQ ID NO: 163609 - RNA, 25 nt, Artificial Sequence
  Description of Artificial Sequence: Synthetic oligonucleotide
augccccauauuaaaagaacucauu

SEQ ID NO: 163610 - RNA, 25 nt, Artificial Sequence
  Description of Artificial Sequence: Synthetic oligonucleotide
ucauaggaagguguuucauuuuggu

SEQ ID NO: 163611 - RNA, 25 nt, Artificial Sequence
  Description of Artificial Sequence: Synthetic oligonucleotide
ugugcaacccugucauuacgucaac

SEQ ID NO: 163612 - RNA, 25 nt, Artificial Sequence
  Description of Artificial Sequence: Synthetic oligonucleotide
cgcaacgucuaacuggacuucccaa

SEQ ID NO: 163613 - RNA, 25 nt, Artificial Sequence
  Description of Artificial Sequence: Synthetic oligonucleotide
agauaaaugguaccagcguccucuu

SEQ ID NO: 163614 - RNA, 25 nt, Artificial Sequence
  Description of Artificial Sequence: Synthetic oligonucleotide
uaaaagaugccuuaauccauuccuu

SEQ ID NO: 163615 - RNA, 25 nt, Artificial Sequence
  Description of Artificial Sequence: Synthetic oligonucleotide
ugaggacagaccuuaguugaaauga

SEQ ID NO: 163616 - RNA, 25 nt, Artificial Sequence
  Description of Artificial Sequence: Synthetic oligonucleotide
auagcagaaugugcuucucucuggc

SEQ ID NO: 163617 - RNA, 25 nt, Artificial Sequence
  Description of Artificial Sequence: Synthetic oligonucleotide
cagcuggccuucugcuucugaguug

SEQ ID NO: 163618 - RNA, 25 nt, Artificial Sequence
  Description of Artificial Sequence: Synthetic oligonucleotide
gcacauuaaucagauuagccuguau

SEQ ID NO: 163619 - RNA, 25 nt, Artificial Sequence
  Description of Artificial Sequence: Synthetic oligonucleotide
uucucuucagugaauuuugauaaug

SEQ ID NO: 163620 - RNA, 25 nt, Artificial Sequence
  Description of Artificial Sequence: Synthetic oligonucleotide
ggcuuccagacucuuuggcguugga

SEQ ID NO: 163621 - RNA, 25 nt, Artificial Sequence
  Description of Artificial Sequence: Synthetic oligonucleotide
agacgccuguuaggaucuucaaguc

SEQ ID NO: 163622 - RNA, 25 nt, Artificial Sequence
  Description of Artificial Sequence: Synthetic oligonucleotide
cccaucauagaaaauugaaacacag

SEQ ID NO: 163623 - RNA, 25 nt, Artificial Sequence
  Description of Artificial Sequence: Synthetic oligonucleotide
gaguuguucugcugauaguuuuggg

SEQ ID NO: 163624 - RNA, 25 nt, Artificial Sequence
  Description of Artificial Sequence: Synthetic oligonucleotide
ggauacguccaucuuuuuaagggau

SEQ ID NO: 163625 - RNA, 25 nt, Artificial Sequence
  Description of Artificial Sequence: Synthetic oligonucleotide
uugcuuucaucuaauucuggcagga

SEQ ID NO: 163626 - RNA, 25 nt, Artificial Sequence
  Description of Artificial Sequence: Synthetic oligonucleotide
accucaccaaaagauccagccucau

SEQ ID NO: 163627 - RNA, 25 nt, Artificial Sequence
  Description of Artificial Sequence: Synthetic oligonucleotide
uaccuacaucagacaaaauaucgcc

SEQ ID NO: 163628 - RNA, 25 nt, Artificial Sequence
  Description of Artificial Sequence: Synthetic oligonucleotide
cguuguuccuucuguacuaaaguau

SEQ ID NO: 163629 - RNA, 25 nt, Artificial Sequence
  Description of Artificial Sequence: Synthetic oligonucleotide
uuguguuuugcuuuggaaacaccca

SEQ ID NO: 163630 - RNA, 25 nt, Artificial Sequence
  Description of Artificial Sequence: Synthetic oligonucleotide
acucacuuugcaauagccgugcaag

SEQ ID NO: 163631 - RNA, 25 nt, Artificial Sequence
  Description of Artificial Sequence: Synthetic oligonucleotide
gaugaaugcagauuacacugaucuu

SEQ ID NO: 163632 - RNA, 25 nt, Artificial Sequence
  Description of Artificial Sequence: Synthetic oligonucleotide
uauguguuacaaaauuggagaaagu

SEQ ID NO: 163633 - RNA, 25 nt, Artificial Sequence
  Description of Artificial Sequence: Synthetic oligonucleotide
uauuuaauaaaaccuguuaauuuuu

SEQ ID NO: 163634 - RNA, 25 nt, Artificial Sequence
  Description of Artificial Sequence: Synthetic oligonucleotide
uauacugacaauaaaaauguuucua

SEQ ID NO: 163635 - RNA, 25 nt, Artificial Sequence
  Description of Artificial Sequence: Synthetic oligonucleotide
acagauauuaauguuaacaagacaa

SEQ ID NO: 163636 - RNA, 25 nt, Artificial Sequence
  Description of Artificial Sequence: Synthetic oligonucleotide
aaauaaaugucacgcaacuuaaaaa

SEQ ID NO: 163637 - RNA, 25 nt, Artificial Sequence
  Description of Artificial Sequence: Synthetic oligonucleotide
agcacucggggauaaauaguuccaa

SEQ ID NO: 163638 - RNA, 25 nt, Artificial Sequence
  Description of Artificial Sequence: Synthetic oligonucleotide
augcagaagugcuggcucuguucaa

SEQ ID NO: 163639 - RNA, 25 nt, Artificial Sequence
  Description of Artificial Sequence: Synthetic oligonucleotide
augugaccgaggcggaugcugggga

SEQ ID NO: 163640 - RNA, 25 nt, Artificial Sequence
  Description of Artificial Sequence: Synthetic oligonucleotide
aauauauauguaaggucuccaauua

SEQ ID NO: 163641 - RNA, 25 nt, Artificial Sequence
  Description of Artificial Sequence: Synthetic oligonucleotide
auauagggcaggccaaccagucugc

SEQ ID NO: 163642 - RNA, 25 nt, Artificial Sequence
  Description of Artificial Sequence: Synthetic oligonucleotide
ccuggcucacuguccugccaaaaca

SEQ ID NO: 163643 - RNA, 25 nt, Artificial Sequence
  Description of Artificial Sequence: Synthetic oligonucleotide
agcaagcgccuggaagagaaaagga

SEQ ID NO: 163644 - RNA, 25 nt, Artificial Sequence
  Description of Artificial Sequence: Synthetic oligonucleotide
agauuacagcuuccccagacuaccu

SEQ ID NO: 163645 - RNA, 25 nt, Artificial Sequence
  Description of Artificial Sequence: Synthetic oligonucleotide
uggagauagccauuuacugcauagg

SEQ ID NO: 163646 - RNA, 25 nt, Artificial Sequence
  Description of Artificial Sequence: Synthetic oligonucleotide
gggucuucuuaaucgccuguauggu

SEQ ID NO: 163647 - RNA, 25 nt, Artificial Sequence
  Description of Artificial Sequence: Synthetic oligonucleotide
ugguaacagucauccugugccgaau

SEQ ID NO: 163648 - RNA, 25 nt, Artificial Sequence
  Description of Artificial Sequence: Synthetic oligonucleotide
ugaagaacacgaccaagaagccaga

SEQ ID NO: 163649 - RNA, 25 nt, Artificial Sequence
  Description of Artificial Sequence: Synthetic oligonucleotide
acuucagcagccagccggcugugca

SEQ ID NO: 163650 - RNA, 25 nt, Artificial Sequence
  Description of Artificial Sequence: Synthetic oligonucleotide
acaagcugaccaaacguaucccccu

SEQ ID NO: 163651 - RNA, 25 nt, Artificial Sequence
  Description of Artificial Sequence: Synthetic oligonucleotide
ugcggagacagguaacaguuucggc

SEQ ID NO: 163652 - RNA, 25 nt, Artificial Sequence
  Description of Artificial Sequence: Synthetic oligonucleotide
cugaguccagcuccuccaugaacuc

SEQ ID NO: 163653 - RNA, 25 nt, Artificial Sequence
  Description of Artificial Sequence: Synthetic oligonucleotide
ccaacaccccgcuggugaggauaac

SEQ ID NO: 163654 - RNA, 25 nt, Artificial Sequence
  Description of Artificial Sequence: Synthetic oligonucleotide
caacacgccucucuucaacggcaga

SEQ ID NO: 163655 - RNA, 25 nt, Artificial Sequence
  Description of Artificial Sequence: Synthetic oligonucleotide
acacccccaugcuggcaggggucuc

SEQ ID NO: 163656 - RNA, 25 nt, Artificial Sequence
  Description of Artificial Sequence: Synthetic oligonucleotide
ccgaguaugaacuuccagaggaccc

SEQ ID NO: 163657 - RNA, 25 nt, Artificial Sequence
  Description of Artificial Sequence: Synthetic oligonucleotide
caaaaugggaguuuccaagagauaa

SEQ ID NO: 163658 - RNA, 25 nt, Artificial Sequence
  Description of Artificial Sequence: Synthetic oligonucleotide
agcugacacugggcaagccccuggg

SEQ ID NO: 163659 - RNA, 25 nt, Artificial Sequence
  Description of Artificial Sequence: Synthetic oligonucleotide
gagaagguugcuuugggcaaguggu

SEQ ID NO: 163660 - RNA, 25 nt, Artificial Sequence
  Description of Artificial Sequence: Synthetic oligonucleotide
ucauggcggaagcagugggaauuga

SEQ ID NO: 163661 - RNA, 25 nt, Artificial Sequence
  Description of Artificial Sequence: Synthetic oligonucleotide
acaaagacaagcccaaggaggcggu

SEQ ID NO: 163662 - RNA, 25 nt, Artificial Sequence
  Description of Artificial Sequence: Synthetic oligonucleotide
ucaccguggccgugaagauguugaa

SEQ ID NO: 163663 - RNA, 25 nt, Artificial Sequence
  Description of Artificial Sequence: Synthetic oligonucleotide
aagaugaugccacagagaaagaccu

SEQ ID NO: 163664 - RNA, 25 nt, Artificial Sequence
  Description of Artificial Sequence: Synthetic oligonucleotide
uuucugaucuggugucagagaugga

SEQ ID NO: 163665 - RNA, 25 nt, Artificial Sequence
  Description of Artificial Sequence: Synthetic oligonucleotide
agaugaugaagaugauugggaaaca

SEQ ID NO: 163666 - RNA, 25 nt, Artificial Sequence
  Description of Artificial Sequence: Synthetic oligonucleotide
acaagaauaucauaaaucuucuugg

SEQ ID NO: 163667 - RNA, 25 nt, Artificial Sequence
  Description of Artificial Sequence: Synthetic oligonucleotide
gagccugcacacaggaugggccucu

SEQ ID NO: 163668 - RNA, 25 nt, Artificial Sequence
  Description of Artificial Sequence: Synthetic oligonucleotide
ucuaugucauaguugaguaugccuc

SEQ ID NO: 163669 - RNA, 25 nt, Artificial Sequence
  Description of Artificial Sequence: Synthetic oligonucleotide
cuaaaggcaaccuccgagaauaccu

SEQ ID NO: 163670 - RNA, 25 nt, Artificial Sequence
  Description of Artificial Sequence: Synthetic oligonucleotide
uccgagcccggaggccacccgggau

SEQ ID NO: 163671 - RNA, 25 nt, Artificial Sequence
  Description of Artificial Sequence: Synthetic oligonucleotide
uggaguacuccuaugacauuaaccg

SEQ ID NO: 163672 - RNA, 25 nt, Artificial Sequence
  Description of Artificial Sequence: Synthetic oligonucleotide
guguuccugaggagcagaugaccuu

SEQ ID NO: 163673 - RNA, 25 nt, Artificial Sequence
  Description of Artificial Sequence: Synthetic oligonucleotide
ucaaggacuuggugucaugcaccua

SEQ ID NO: 163674 - RNA, 25 nt, Artificial Sequence
  Description of Artificial Sequence: Synthetic oligonucleotide
accagcuggccagaggcauggagua

SEQ ID NO: 163675 - RNA, 25 nt, Artificial Sequence
  Description of Artificial Sequence: Synthetic oligonucleotide
acuuggcuucccaaaaauguauuca

SEQ ID NO: 163676 - RNA, 25 nt, Artificial Sequence
  Description of Artificial Sequence: Synthetic oligonucleotide
aucgagauuuagcagccagaaaugu

SEQ ID NO: 163677 - RNA, 25 nt, Artificial Sequence
  Description of Artificial Sequence: Synthetic oligonucleotide
uuuugguaacagaaaacaaugugau

SEQ ID NO: 163678 - RNA, 25 nt, Artificial Sequence
  Description of Artificial Sequence: Synthetic oligonucleotide
ugaaaauagcagacuuuggacucgc

SEQ ID NO: 163679 - RNA, 25 nt, Artificial Sequence
  Description of Artificial Sequence: Synthetic oligonucleotide
ccagagauaucaacaauauagacua

SEQ ID NO: 163680 - RNA, 25 nt, Artificial Sequence
  Description of Artificial Sequence: Synthetic oligonucleotide
auuacaaaaagaccaccaaugggcg

SEQ ID NO: 163681 - RNA, 25 nt, Artificial Sequence
  Description of Artificial Sequence: Synthetic oligonucleotide
ggcuuccagucaaguggauggcucc

SEQ ID NO: 163682 - RNA, 25 nt, Artificial Sequence
  Description of Artificial Sequence: Synthetic oligonucleotide
cagaagcccuguuugauagaguaua

SEQ ID NO: 163683 - RNA, 25 nt, Artificial Sequence
  Description of Artificial Sequence: Synthetic oligonucleotide
acacucaucagagugaugucugguc

SEQ ID NO: 163684 - RNA, 25 nt, Artificial Sequence
  Description of Artificial Sequence: Synthetic oligonucleotide
ccuucgggguguuaaugugggagau

SEQ ID NO: 163685 - RNA, 25 nt, Artificial Sequence
  Description of Artificial Sequence: Synthetic oligonucleotide
ucuucacuuuagggggcucgcccua

SEQ ID NO: 163686 - RNA, 25 nt, Artificial Sequence
  Description of Artificial Sequence: Synthetic oligonucleotide
acccagggauucccguggaggaacu

SEQ ID NO: 163687 - RNA, 25 nt, Artificial Sequence
  Description of Artificial Sequence: Synthetic oligonucleotide
uuuuuaagcugcugaaggaaggaca

SEQ ID NO: 163688 - RNA, 25 nt, Artificial Sequence
  Description of Artificial Sequence: Synthetic oligonucleotide
acagaauggauaagccagccaacug

SEQ ID NO: 163689 - RNA, 25 nt, Artificial Sequence
  Description of Artificial Sequence: Synthetic oligonucleotide
gcaccaacgaacuguacaugaugau

SEQ ID NO: 163690 - RNA, 25 nt, Artificial Sequence
  Description of Artificial Sequence: Synthetic oligonucleotide
ugagggacuguuggcaugcagugcc

SEQ ID NO: 163691 - RNA, 25 nt, Artificial Sequence
  Description of Artificial Sequence: Synthetic oligonucleotide
ccucccagagaccaacguucaagca

SEQ ID NO: 163692 - RNA, 25 nt, Artificial Sequence
  Description of Artificial Sequence: Synthetic oligonucleotide
aguugguagaagacuuggaucgaau

SEQ ID NO: 163693 - RNA, 25 nt, Artificial Sequence
  Description of Artificial Sequence: Synthetic oligonucleotide
uucucacucucacaaccaaugagga

SEQ ID NO: 163694 - RNA, 25 nt, Artificial Sequence
  Description of Artificial Sequence: Synthetic oligonucleotide
aauacuuggaccucagccaaccucu

SEQ ID NO: 163695 - RNA, 25 nt, Artificial Sequence
  Description of Artificial Sequence: Synthetic oligonucleotide
ucgaacaguauucaccuaguuaccc

SEQ ID NO: 163696 - RNA, 25 nt, Artificial Sequence
  Description of Artificial Sequence: Synthetic oligonucleotide
cugacacaagaaguucuuguucuuc

SEQ ID NO: 163697 - RNA, 25 nt, Artificial Sequence
  Description of Artificial Sequence: Synthetic oligonucleotide
caggagaugauucuguuuuuucucc

SEQ ID NO: 163698 - RNA, 25 nt, Artificial Sequence
  Description of Artificial Sequence: Synthetic oligonucleotide
cagaccccaugccuuacgaaccaug

SEQ ID NO: 163699 - RNA, 25 nt, Artificial Sequence
  Description of Artificial Sequence: Synthetic oligonucleotide
gccuuccucaguauccacacauaaa

SEQ ID NO: 163700 - RNA, 25 nt, Artificial Sequence
  Description of Artificial Sequence: Synthetic oligonucleotide
acggcaguguuaaaacaugaaugac

SEQ ID NO: 163701 - RNA, 25 nt, Artificial Sequence
  Description of Artificial Sequence: Synthetic oligonucleotide
cugugucugccuguccccaaacagg

SEQ ID NO: 163702 - RNA, 25 nt, Artificial Sequence
  Description of Artificial Sequence: Synthetic oligonucleotide
gacagcacugggaaccuagcuacac

SEQ ID NO: 163703 - RNA, 25 nt, Artificial Sequence
  Description of Artificial Sequence: Synthetic oligonucleotide
cugagcagggagaccaugccuccca

SEQ ID NO: 163704 - RNA, 25 nt, Artificial Sequence
  Description of Artificial Sequence: Synthetic oligonucleotide
agagcuuguugucuccacuuguaua

SEQ ID NO: 163705 - RNA, 25 nt, Artificial Sequence
  Description of Artificial Sequence: Synthetic oligonucleotide
auauggaucagaggaguaaauaauu

SEQ ID NO: 163706 - RNA, 25 nt, Artificial Sequence
  Description of Artificial Sequence: Synthetic oligonucleotide
uggaaaaguaaucagcauaugugua

SEQ ID NO: 163707 - RNA, 25 nt, Artificial Sequence
  Description of Artificial Sequence: Synthetic oligonucleotide
aaagauuuauacaguugaaaacuug

SEQ ID NO: 163708 - RNA, 25 nt, Artificial Sequence
  Description of Artificial Sequence: Synthetic oligonucleotide
guaaucuuccccaggaggagaagaa

SEQ ID NO: 163709 - RNA, 25 nt, Artificial Sequence
  Description of Artificial Sequence: Synthetic oligonucleotide
agguuucuggagcaguggacugcca

SEQ ID NO: 163710 - RNA, 25 nt, Artificial Sequence
  Description of Artificial Sequence: Synthetic oligonucleotide
acaagccaccauguaaccccucuca

SEQ ID NO: 163711 - RNA, 25 nt, Artificial Sequence
  Description of Artificial Sequence: Synthetic oligonucleotide
accugccgugcguacuggcugugga

SEQ ID NO: 163712 - RNA, 25 nt, Artificial Sequence
  Description of Artificial Sequence: Synthetic oligonucleotide
accaguaggacucaagguggacgug

SEQ ID NO: 163713 - RNA, 25 nt, Artificial Sequence
  Description of Artificial Sequence: Synthetic oligonucleotide
gcguucugccuuccuuguuaauuuu

SEQ ID NO: 163714 - RNA, 25 nt, Artificial Sequence
  Description of Artificial Sequence: Synthetic oligonucleotide
uguaauaauuggagaagauuuaugu

SEQ ID NO: 163715 - RNA, 25 nt, Artificial Sequence
  Description of Artificial Sequence: Synthetic oligonucleotide
ucagcacacacuuacagagcacaaa

SEQ ID NO: 163716 - RNA, 25 nt, Artificial Sequence
  Description of Artificial Sequence: Synthetic oligonucleotide
augcaguauauaggugcuggaugua

SEQ ID NO: 163717 - RNA, 25 nt, Artificial Sequence
  Description of Artificial Sequence: Synthetic oligonucleotide
auguaaauauauucaaauuauguau

SEQ ID NO: 163718 - RNA, 25 nt, Artificial Sequence
  Description of Artificial Sequence: Synthetic oligonucleotide
uaaauauauauuauauauuuacaag

SEQ ID NO: 163719 - RNA, 25 nt, Artificial Sequence
  Description of Artificial Sequence: Synthetic oligonucleotide
ggaguuauuuuuuguauugauuuua

SEQ ID NO: 163720 - RNA, 25 nt, Artificial Sequence
  Description of Artificial Sequence: Synthetic oligonucleotide
aaauggaugucccaaugcaccuaga

SEQ ID NO: 163721 - RNA, 25 nt, Artificial Sequence
  Description of Artificial Sequence: Synthetic oligonucleotide
aaaauuggucucucuuuuuuuaaua

SEQ ID NO: 163722 - RNA, 25 nt, Artificial Sequence
  Description of Artificial Sequence: Synthetic oligonucleotide
agcuauuugcuaaaugcuguucuua

SEQ ID NO: 163723 - RNA, 25 nt, Artificial Sequence
  Description of Artificial Sequence: Synthetic oligonucleotide
acacauaauuucuuaauuuucaccg

SEQ ID NO: 163724 - RNA, 25 nt, Artificial Sequence
  Description of Artificial Sequence: Synthetic oligonucleotide
gagcagagguggaaaaauacuuuug

SEQ ID NO: 163725 - RNA, 25 nt, Artificial Sequence
  Description of Artificial Sequence: Synthetic oligonucleotide
gcuuucagggaaaaugguauaacgu

SEQ ID NO: 163726 - RNA, 25 nt, Artificial Sequence
  Description of Artificial Sequence: Synthetic oligonucleotide
uuaauuuauuaauaaauugguaaua

SEQ ID NO: 163727 - RNA, 25 nt, Artificial Sequence
  Description of Artificial Sequence: Synthetic oligonucleotide
auacaaaacaauuaaucauuuauag

SEQ ID NO: 163728 - RNA, 25 nt, Artificial Sequence
  Description of Artificial Sequence: Synthetic oligonucleotide
guuuuuuuuguaauuuaaguggcau

SEQ ID NO: 163729 - RNA, 25 nt, Artificial Sequence
  Description of Artificial Sequence: Synthetic oligonucleotide
uuucuaugcaggcagcacagcagac

SEQ ID NO: 163730 - RNA, 25 nt, Artificial Sequence
  Description of Artificial Sequence: Synthetic oligonucleotide
cuaguuaaucuauugcuuggacuua

SEQ ID NO: 163731 - RNA, 25 nt, Artificial Sequence
  Description of Artificial Sequence: Synthetic oligonucleotide
aacuaguuaucagauccuuugaaaa

SEQ ID NO: 163732 - RNA, 25 nt, Artificial Sequence
  Description of Artificial Sequence: Synthetic oligonucleotide
agagaauauuuacaauauaugacua

SEQ ID NO: 163733 - RNA, 25 nt, Artificial Sequence
  Description of Artificial Sequence: Synthetic oligonucleotide
aauuuggggaaaaugaaguuuugau

SEQ ID NO: 163734 - RNA, 25 nt, Artificial Sequence
  Description of Artificial Sequence: Synthetic oligonucleotide
uuuauuuguguuuaaaugcugcugu

SEQ ID NO: 163735 - RNA, 25 nt, Artificial Sequence
  Description of Artificial Sequence: Synthetic oligonucleotide
ucagacgauuguucuuagaccuccu

SEQ ID NO: 163736 - RNA, 25 nt, Artificial Sequence
  Description of Artificial Sequence: Synthetic oligonucleotide
uaaaugccccauauuaaaagaacuc

SEQ ID NO: 163737 - RNA, 25 nt, Artificial Sequence
  Description of Artificial Sequence: Synthetic oligonucleotide
cauucauaggaagguguuucauuuu

SEQ ID NO: 163738 - RNA, 25 nt, Artificial Sequence
  Description of Artificial Sequence: Synthetic oligonucleotide
uggugugcaacccugucauuacguc

SEQ ID NO: 163739 - RNA, 25 nt, Artificial Sequence
  Description of Artificial Sequence: Synthetic oligonucleotide
caacgcaacgucuaacuggacuucc

SEQ ID NO: 163740 - RNA, 25 nt, Artificial Sequence
  Description of Artificial Sequence: Synthetic oligonucleotide
ccaagauaaaugguaccagcguccu

SEQ ID NO: 163741 - RNA, 25 nt, Artificial Sequence
  Description of Artificial Sequence: Synthetic oligonucleotide
ucuuaaaagaugccuuaauccauuc

SEQ ID NO: 163742 - RNA, 25 nt, Artificial Sequence
  Description of Artificial Sequence: Synthetic oligonucleotide
ccuugaggacagaccuuaguugaaa

SEQ ID NO: 163743 - RNA, 25 nt, Artificial Sequence
  Description of Artificial Sequence: Synthetic oligonucleotide
augauagcagaaugugcuucucucu

SEQ ID NO: 163744 - RNA, 25 nt, Artificial Sequence
  Description of Artificial Sequence: Synthetic oligonucleotide
uggcagcuggccuucugcuucugag

SEQ ID NO: 163745 - RNA, 25 nt, Artificial Sequence
  Description of Artificial Sequence: Synthetic oligonucleotide
guugcacauuaaucagauuagccug

SEQ ID NO: 163746 - RNA, 25 nt, Artificial Sequence
  Description of Artificial Sequence: Synthetic oligonucleotide
guauucucuucagugaauuuugaua

SEQ ID NO: 163747 - RNA, 25 nt, Artificial Sequence
  Description of Artificial Sequence: Synthetic oligonucleotide
aauggcuuccagacucuuuggcguu

SEQ ID NO: 163748 - RNA, 25 nt, Artificial Sequence
  Description of Artificial Sequence: Synthetic oligonucleotide
uggagacgccuguuaggaucuucaa

SEQ ID NO: 163749 - RNA, 25 nt, Artificial Sequence
  Description of Artificial Sequence: Synthetic oligonucleotide
agucccaucauagaaaauugaaaca

SEQ ID NO: 163750 - RNA, 25 nt, Artificial Sequence
  Description of Artificial Sequence: Synthetic oligonucleotide
acagaguuguucugcugauaguuuu

SEQ ID NO: 163751 - RNA, 25 nt, Artificial Sequence
  Description of Artificial Sequence: Synthetic oligonucleotide
uggggauacguccaucuuuuuaagg

SEQ ID NO: 163752 - RNA, 25 nt, Artificial Sequence
  Description of Artificial Sequence: Synthetic oligonucleotide
ggauugcuuucaucuaauucuggca

SEQ ID NO: 163753 - RNA, 25 nt, Artificial Sequence
  Description of Artificial Sequence: Synthetic oligonucleotide
aggaccucaccaaaagauccagccu

SEQ ID NO: 163754 - RNA, 25 nt, Artificial Sequence
  Description of Artificial Sequence: Synthetic oligonucleotide
ucauaccuacaucagacaaaauauc

SEQ ID NO: 163755 - RNA, 25 nt, Artificial Sequence
  Description of Artificial Sequence: Synthetic oligonucleotide
cgccguuguuccuucuguacuaaag

SEQ ID NO: 163756 - RNA, 25 nt, Artificial Sequence
  Description of Artificial Sequence: Synthetic oligonucleotide
guauuguguuuugcuuuggaaacac

SEQ ID NO: 163757 - RNA, 25 nt, Artificial Sequence
  Description of Artificial Sequence: Synthetic oligonucleotide
cccacucacuuugcaauagccgugc

SEQ ID NO: 163758 - RNA, 25 nt, Artificial Sequence
  Description of Artificial Sequence: Synthetic oligonucleotide
caagaugaaugcagauuacacugau

SEQ ID NO: 163759 - RNA, 25 nt, Artificial Sequence
  Description of Artificial Sequence: Synthetic oligonucleotide
ucuuauguguuacaaaauuggagaa

SEQ ID NO: 163760 - RNA, 25 nt, Artificial Sequence
  Description of Artificial Sequence: Synthetic oligonucleotide
aaguauuuaauaaaaccuguuaauu

SEQ ID NO: 163761 - RNA, 25 nt, Artificial Sequence
  Description of Artificial Sequence: Synthetic oligonucleotide
uuuuauacugacaauaaaaauguuu

SEQ ID NO: 163762 - RNA, 25 nt, Artificial Sequence
  Description of Artificial Sequence: Synthetic oligonucleotide
ucuacagauauuaauguuaacaaga

SEQ ID NO: 163763 - RNA, 25 nt, Artificial Sequence
  Description of Artificial Sequence: Synthetic oligonucleotide
acaaaauaaaugucacgcaacuuaa

SEQ ID NO: 163764 - RNA, 3757 nt, Homo sapiens
cgcgcgcugccugaggacgccgcggcccccgcccccgccaugggcgccccugccugcgcccucgcgcucugcguggccguggccaucguggccggcgccuccucggaguccuuggggacggagcagcgcgucguggggcgagcggcagaagucccgggcccagagcccggccagcaggagcaguuggucuucggcagcggggaugcuguggagcugagcugucccccgcccggggguggucccauggggcccacugucugggucaaggauggcacagggcuggugcccucggagcguguccugguggggccccagcggcugcaggugcugaaugccucccacgaggacuccggggccuacagcugccggcagcggcucacgcagcgcguacugugccacuucagugugcgggugacagacgcuccauccucgggagaugacgaagacggggaggacgaggcugaggacacagguguggacacaggggccccuuacuggacacggcccgagcggauggacaagaagcugcuggccgugccggccgccaacaccguccgcuuccgcugcccagccgcuggcaaccccacucccuccaucuccuggcugaagaacggcagggaguuccgcggcgagcaccgcauuggaggcaucaagcugcggcaucagcaguggagccuggucauggaaagcguggugcccucggaccgcggcaacuacaccugcgucguggagaacaaguuuggcagcauccggcagacguacacgcuggacgugcuggagcgcuccccgcaccggcccauccugcaggcggggcugccggccaaccagacggcggugcugggcagcgacguggaguuccacugcaagguguacagugacgcacagccccacauccaguggcucaagcacguggaggugaacggcagcaaggugggcccggacggcacacccuacguuaccgugcucaaggugucccuggaguccaacgcguccaugagcuccaacacaccacuggugcgcaucgcaaggcuguccucaggggagggccccacgcuggccaaugucuccgagcucgagcugccugccgaccccaaaugggagcugucucgggcccggcugacccugggcaagccccuuggggagggcugcuucggccagguggucauggcggaggccaucggcauugacaaggaccgggccgccaagccugucaccguagccgugaagaugcugaaagacgaugccacugacaaggaccugucggaccuggugucugagauggagaugaugaagaugaucgggaaacacaaaaacaucaucaaccugcugggcgccugcacgcagggcgggccccuguacgugcugguggaguacgcggccaaggguaaccugcgggaguuucugcgggcgcggcggcccccgggccuggacuacuccuucgacaccugcaagccgcccgaggagcagcucaccuucaaggaccugguguccugugccuaccagguggcccggggcauggaguacuuggccucccagaagugcauccacagggaccuggcugcccgcaaugugcuggugaccgaggacaacgugaugaagaucgcagacuucgggcuggcccgggacgugcacaaccucgacuacuacaagaagacaaccaacggccggcugcccgugaaguggauggcgccugaggccuuguuugaccgagucuacacucaccagagugacgucugguccuuugggguccugcucugggagaucuucacgcuggggggcuccccguaccccggcaucccuguggaggagcucuucaagcugcugaaggagggccaccgcauggacaagcccgccaacugcacacacgaccuguacaugaucaugcgggagugcuggcaugccgcgcccucccagaggcccaccuucaagcagcugguggaggaccuggaccguguccuuaccgugacguccaccgacgaguaccuggaccugucggcgccuuucgagcaguacuccccggguggccaggacacccccagcuccagcuccucaggggacgacuccguguuugcccacgaccugcugcccccggccccacccagcagugggggcucgcggacgugaagggccacugguccccaacaaugugaggggucccuagcagcccucccugcugcuggugcacagccacuccccggcaugagacucagugcagauggagagacagcuacacagagcuuuggucugugugugugugugugcgugugugugugugugugcacauccgcgugugccugugugcgugcgcaucuugccuccaggugcagagguacccuggguguccccgcugcugugcaacggucuccugacuggugcugcagcaccgaggggccuuuguucuggggggacccagugcagaauguaagugggcccacccggugggaccccguggggcagggagcugggcccgacauggcucggccucugccuuugcaccacgggacaucacagggugcgcucggccccucccacacccaaagcugagccugcagggaagccccacauguccagcaccuugugccugggguguuaguggcaccgccuccccaccuccaggcuuucccacuucccacccugccccucagagacugaaauuacggguaccugaagaugggagccuuuaccuuuuaugcaaaagguuuauuccggaaacuaguguacauuucuauaaauagaugcuguguauaugguauauauacauauauauauauaacauauauggaagaggaaaaggcugguacaacggaggccugcgacccugggggcacaggaggcaggcauggcccugggcggggcgugggggggcguggagggaggccccaggggucucacccaugcaagcagaggaccagggcuuuuucuggcaccgcaguuuuguuuuaaaacuggaccuguauauuuguaaagcuauuuaugggccccuggcacucuuguucccacaccccaacacuuccagcauuuagcuggccacauggcggagaguuuuaauuuuuaacuuauugacaaccgagaagguuuaucccgccgauagagggacggccaagaauguacguccagccugccccggagcuggaggauccccuccaagccuaaaagguuguuaauaguuggaggugauuccagugaagauauuuuauuugcuuuguccuuuuucaggagaauuagauuucuauaggauuuuucuuuaggagauuuauuuuuuggacuucaaagcaagcugguauuuucauacaaauucuucuaauugcugugugucccaggcagggagacgguuuccagggaggggccggcccugugugcagguuccgauguuauuagauguuacaaguuuauauauaucuauauauauaauuuauugaguuuuuacaagauguauuuguuguagacuuaacacuucuuacgcaaugcuucuagaguuuuauagccuggacugcuaccuuucaaagcuuggagggaagccgugaauucaguugguucguucuguacuguuacugggcccugagucugggcagcugucccuugcuugccugcagggccauggcucaggguggucucuucuuggggcccagugcaugguggccagaggugucacccaaaccggcaggugcgauuuuguuaacccagcgacgaacuuuccgaaaaauaaagacaccugguugcuaaccugaaaaaaaaaaaaaaaaaaaaaaaaaaaaaa

SEQ ID NO: 163765 - RNA, 4093 nt, Homo sapiens
cgcgcgcugccugaggacgccgcggcccccgcccccgccaugggcgccccugccugcgcccucgcgcucugcguggccguggccaucguggccggcgccuccucggaguccuuggggacggagcagcgcgucguggggcgagcggcagaagucccgggcccagagcccggccagcaggagcaguuggucuucggcagcggggaugcuguggagcugagcugucccccgcccggggguggucccauggggcccacugucugggucaaggauggcacagggcuggugcccucggagcguguccugguggggccccagcggcugcaggugcugaaugccucccacgaggacuccggggccuacagcugccggcagcggcucacgcagcgcguacugugccacuucagugugcgggugacagacgcuccauccucgggagaugacgaagacggggaggacgaggcugaggacacagguguggacacaggggccccuuacuggacacggcccgagcggauggacaagaagcugcuggccgugccggccgccaacaccguccgcuuccgcugcccagccgcuggcaaccccacucccuccaucuccuggcugaagaacggcagggaguuccgcggcgagcaccgcauuggaggcaucaagcugcggcaucagcaguggagccuggucauggaaagcguggugcccucggaccgcggcaacuacaccugcgucguggagaacaaguuuggcagcauccggcagacguacacgcuggacgugcuggagcgcuccccgcaccggcccauccugcaggcggggcugccggccaaccagacggcggugcugggcagcgacguggaguuccacugcaagguguacagugacgcacagccccacauccaguggcucaagcacguggaggugaacggcagcaaggugggcccggacggcacacccuacguuaccgugcucaagacggcgggcgcuaacaccaccgacaaggagcuagagguucucuccuugcacaacgucaccuuugaggacgccggggaguacaccugccuggcgggcaauucuauuggguuuucucaucacucugcguggcugguggugcugccagccgaggaggagcugguggaggcugacgaggcgggcaguguguaugcaggcauccucagcuacggggugggcuucuuccuguucauccuggugguggcggcugugacgcucugccgccugcgcagcccccccaagaaaggccugggcucccccaccgugcacaagaucucccgcuucccgcucaagcgacaggugucccuggaguccaacgcguccaugagcuccaacacaccacuggugcgcaucgcaaggcuguccucaggggagggccccacgcuggccaaugucuccgagcucgagcugccugccgaccccaaaugggagcugucucgggcccggcugacccugggcaagccccuuggggagggcugcuucggccagguggucauggcggaggccaucggcauugacaaggaccgggccgccaagccugucaccguagccgugaagaugcugaaagacgaugccacugacaaggaccugucggaccuggugucugagauggagaugaugaagaugaucgggaaacacaaaaacaucaucaaccugcugggcgccugcacgcagggcgggccccuguacgugcugguggaguacgcggccaaggguaaccugcgggaguuucugcgggcgcggcggcccccgggccuggacuacuccuucgacaccugcaagccgcccgaggagcagcucaccuucaaggaccugguguccugugccuaccagguggcccggggcauggaguacuuggccucccagaagugcauccacagggaccuggcugcccgcaaugugcuggugaccgaggacaacgugaugaagaucgcagacuucgggcuggcccgggacgugcacaaccucgacuacuacaagaagacaaccaacggccggcugcccgugaaguggauggcgccugaggccuuguuugaccgagucuacacucaccagagugacgucugguccuuugggguccugcucugggagaucuucacgcuggggggcuccccguaccccggcaucccuguggaggagcucuucaagcugcugaaggagggccaccgcauggacaagcccgccaacugcacacacgaccuguacaugaucaugcgggagugcuggcaugccgcgcccucccagaggcccaccuucaagcagcugguggaggaccuggaccguguccuuaccgugacguccaccgacgaguaccuggaccugucggcgccuuucgagcaguacuccccggguggccaggacacccccagcuccagcuccucaggggacgacuccguguuugcccacgaccugcugcccccggccccacccagcagugggggcucgcggacgugaagggccacugguccccaacaaugugaggggucccuagcagcccucccugcugcuggugcacagccacuccccggcaugagacucagugcagauggagagacagcuacacagagcuuuggucugugugugugugugugcgugugugugugugugugcacauccgcgugugccugugugcgugcgcaucuugccuccaggugcagagguacccuggguguccccgcugcugugcaacggucuccugacuggugcugcagcaccgaggggccuuuguucuggggggacccagugcagaauguaagugggcccacccggugggaccccguggggcagggagcugggcccgacauggcucggccucugccuuugcaccacgggacaucacagggugcgcucggccccucccacacccaaagcugagccugcagggaagccccacauguccagcaccuugugccugggguguuaguggcaccgccuccccaccuccaggcuuucccacuucccacccugccccucagagacugaaauuacggguaccugaagaugggagccuuuaccuuuuaugcaaaagguuuauuccggaaacuaguguacauuucuauaaauagaugcuguguauaugguauauauacauauauauauauaacauauauggaagaggaaaaggcugguacaacggaggccugcgacccugggggcacaggaggcaggcauggcccugggcggggcgugggggggcguggagggaggccccaggggucucacccaugcaagcagaggaccagggcuuuuucuggcaccgcaguuuuguuuuaaaacuggaccuguauauuuguaaagcuauuuaugggccccuggcacucuuguucccacaccccaacacuuccagcauuuagcuggccacauggcggagaguuuuaauuuuuaacuuauugacaaccgagaagguuuaucccgccgauagagggacggccaagaauguacguccagccugccccggagcuggaggauccccuccaagccuaaaagguuguuaauaguuggaggugauuccagugaagauauuuuauuugcuuuguccuuuuucaggagaauuagauuucuauaggauuuuucuuuaggagauuuauuuuuuggacuucaaagcaagcugguauuuucauacaaauucuucuaauugcugugugucccaggcagggagacgguuuccagggaggggccggcccugugugcagguuccgauguuauuagauguuacaaguuuauauauaucuauauauauaauuuauugaguuuuuacaagauguauuuguuguagacuuaacacuucuuacgcaaugcuucuagaguuuuauagccuggacugcuaccuuucaaagcuuggagggaagccgugaauucaguugguucguucuguacuguuacugggcccugagucugggcagcugucccuugcuugccugcagggccauggcucaggguggucucuucuuggggcccagugcaugguggccagaggugucacccaaaccggcaggugcgauuuuguuaacccagcgacgaacuuuccgaaaaauaaagacaccugguugcuaaccugaaaaaaaaaaaaaaaaaaaaaaaaaaaaaa

SEQ ID NO: 163766 - RNA, 19 nt, Artificial Sequence
  Description of Artificial Sequence: Synthetic oligonucleotide
cgcgcgcugccugaggacg

SEQ ID NO: 163767 - RNA, 19 nt, Artificial Sequence
  Description of Artificial Sequence: Synthetic oligonucleotide
gccgcggcccccgcccccg

SEQ ID NO: 163768 - RNA, 19 nt, Artificial Sequence
  Description of Artificial Sequence: Synthetic oligonucleotide
gccaugggcgccccugccu

SEQ ID NO: 163769 - RNA, 19 nt, Artificial Sequence
  Description of Artificial Sequence: Synthetic oligonucleotide
ugcgcccucgcgcucugcg

SEQ ID NO: 163770 - RNA, 19 nt, Artificial Sequence
  Description of Artificial Sequence: Synthetic oligonucleotide
guggccguggccaucgugg

SEQ ID NO: 163771 - RNA, 19 nt, Artificial Sequence
  Description of Artificial Sequence: Synthetic oligonucleotide
gccggcgccuccucggagu

SEQ ID NO: 163772 - RNA, 19 nt, Artificial Sequence
  Description of Artificial Sequence: Synthetic oligonucleotide
uccuuggggacggagcagc

SEQ ID NO: 163773 - RNA, 19 nt, Artificial Sequence
  Description of Artificial Sequence: Synthetic oligonucleotide
cgcgucguggggcgagcgg

SEQ ID NO: 163774 - RNA, 19 nt, Artificial Sequence
  Description of Artificial Sequence: Synthetic oligonucleotide
gcagaagucccgggcccag

SEQ ID NO: 163775 - RNA, 19 nt, Artificial Sequence
  Description of Artificial Sequence: Synthetic oligonucleotide
gagcccggccagcaggagc

SEQ ID NO: 163776 - RNA, 19 nt, Artificial Sequence
  Description of Artificial Sequence: Synthetic oligonucleotide
caguuggucuucggcagcg

SEQ ID NO: 163777 - RNA, 19 nt, Artificial Sequence
  Description of Artificial Sequence: Synthetic oligonucleotide
ggggaugcuguggagcuga

SEQ ID NO: 163778 - RNA, 19 nt, Artificial Sequence
  Description of Artificial Sequence: Synthetic oligonucleotide
agcugucccccgcccgggg

SEQ ID NO: 163779 - RNA, 19 nt, Artificial Sequence
  Description of Artificial Sequence: Synthetic oligonucleotide
gguggucccauggggccca

SEQ ID NO: 163780 - RNA, 19 nt, Artificial Sequence
  Description of Artificial Sequence: Synthetic oligonucleotide
acugucugggucaaggaug

SEQ ID NO: 163781 - RNA, 19 nt, Artificial Sequence
  Description of Artificial Sequence: Synthetic oligonucleotide
ggcacagggcuggugcccu

SEQ ID NO: 163782 - RNA, 19 nt, Artificial Sequence
  Description of Artificial Sequence: Synthetic oligonucleotide
ucggagcguguccuggugg

SEQ ID NO: 163783 - RNA, 19 nt, Artificial Sequence
  Description of Artificial Sequence: Synthetic oligonucleotide
gggccccagcggcugcagg

SEQ ID NO: 163784 - RNA, 19 nt, Artificial Sequence
  Description of Artificial Sequence: Synthetic oligonucleotide
gugcugaaugccucccacg

SEQ ID NO: 163785 - RNA, 19 nt, Artificial Sequence
  Description of Artificial Sequence: Synthetic oligonucleotide
gaggacuccggggccuaca

SEQ ID NO: 163786 - RNA, 19 nt, Artificial Sequence
  Description of Artificial Sequence: Synthetic oligonucleotide
agcugccggcagcggcuca

SEQ ID NO: 163787 - RNA, 19 nt, Artificial Sequence
  Description of Artificial Sequence: Synthetic oligonucleotide
acgcagcgcguacugugcc

SEQ ID NO: 163788 - RNA, 19 nt, Artificial Sequence
  Description of Artificial Sequence: Synthetic oligonucleotide
cacuucagugugcggguga

SEQ ID NO: 163789 - RNA, 19 nt, Artificial Sequence
  Description of Artificial Sequence: Synthetic oligonucleotide
acagacgcuccauccucgg

SEQ ID NO: 163790 - RNA, 19 nt, Artificial Sequence
  Description of Artificial Sequence: Synthetic oligonucleotide
ggagaugacgaagacgggg

SEQ ID NO: 163791 - RNA, 19 nt, Artificial Sequence
  Description of Artificial Sequence: Synthetic oligonucleotide
gaggacgaggcugaggaca

SEQ ID NO: 163792 - RNA, 19 nt, Artificial Sequence
  Description of Artificial Sequence: Synthetic oligonucleotide
acagguguggacacagggg

SEQ ID NO: 163793 - RNA, 19 nt, Artificial Sequence
  Description of Artificial Sequence: Synthetic oligonucleotide
gccccuuacuggacacggc

SEQ ID NO: 163794 - RNA, 19 nt, Artificial Sequence
  Description of Artificial Sequence: Synthetic oligonucleotide
cccgagcggauggacaaga

SEQ ID NO: 163795 - RNA, 19 nt, Artificial Sequence
  Description of Artificial Sequence: Synthetic oligonucleotide
aagcugcuggccgugccgg

SEQ ID NO: 163796 - RNA, 19 nt, Artificial Sequence
  Description of Artificial Sequence: Synthetic oligonucleotide
gccgccaacaccguccgcu

SEQ ID NO: 163797 - RNA, 19 nt, Artificial Sequence
  Description of Artificial Sequence: Synthetic oligonucleotide
uuccgcugcccagccgcug

SEQ ID NO: 163798 - RNA, 19 nt, Artificial Sequence
  Description of Artificial Sequence: Synthetic oligonucleotide
ggcaaccccacucccucca

SEQ ID NO: 163799 - RNA, 19 nt, Artificial Sequence
  Description of Artificial Sequence: Synthetic oligonucleotide
aucuccuggcugaagaacg

SEQ ID NO: 163800 - RNA, 19 nt, Artificial Sequence
  Description of Artificial Sequence: Synthetic oligonucleotide
ggcagggaguuccgcggcg

SEQ ID NO: 163801 - RNA, 19 nt, Artificial Sequence
  Description of Artificial Sequence: Synthetic oligonucleotide
gagcaccgcauuggaggca

SEQ ID NO: 163802 - RNA, 19 nt, Artificial Sequence
  Description of Artificial Sequence: Synthetic oligonucleotide
aucaagcugcggcaucagc

SEQ ID NO: 163803 - RNA, 19 nt, Artificial Sequence
  Description of Artificial Sequence: Synthetic oligonucleotide
caguggagccuggucaugg

SEQ ID NO: 163804 - RNA, 19 nt, Artificial Sequence
  Description of Artificial Sequence: Synthetic oligonucleotide
gaaagcguggugcccucgg

SEQ ID NO: 163805 - RNA, 19 nt, Artificial Sequence
  Description of Artificial Sequence: Synthetic oligonucleotide
gaccgcggcaacuacaccu

SEQ ID NO: 163806 - RNA, 19 nt, Artificial Sequence
  Description of Artificial Sequence: Synthetic oligonucleotide
ugcgucguggagaacaagu

SEQ ID NO: 163807 - RNA, 19 nt, Artificial Sequence
  Description of Artificial Sequence: Synthetic oligonucleotide
uuuggcagcauccggcaga

SEQ ID NO: 163808 - RNA, 19 nt, Artificial Sequence
  Description of Artificial Sequence: Synthetic oligonucleotide
acguacacgcuggacgugc

SEQ ID NO: 163809 - RNA, 19 nt, Artificial Sequence
  Description of Artificial Sequence: Synthetic oligonucleotide
cuggagcgcuccccgcacc

SEQ ID NO: 163810 - RNA, 19 nt, Artificial Sequence
  Description of Artificial Sequence: Synthetic oligonucleotide
cggcccauccugcaggcgg

SEQ ID NO: 163811 - RNA, 19 nt, Artificial Sequence
  Description of Artificial Sequence: Synthetic oligonucleotide
gggcugccggccaaccaga

SEQ ID NO: 163812 - RNA, 19 nt, Artificial Sequence
  Description of Artificial Sequence: Synthetic oligonucleotide
acggcggugcugggcagcg

SEQ ID NO: 163813 - RNA, 19 nt, Artificial Sequence
  Description of Artificial Sequence: Synthetic oligonucleotide
gacguggaguuccacugca

SEQ ID NO: 163814 - RNA, 19 nt, Artificial Sequence
  Description of Artificial Sequence: Synthetic oligonucleotide
aagguguacagugacgcac

SEQ ID NO: 163815 - RNA, 19 nt, Artificial Sequence
  Description of Artificial Sequence: Synthetic oligonucleotide
cagccccacauccaguggc

SEQ ID NO: 163816 - RNA, 19 nt, Artificial Sequence
  Description of Artificial Sequence: Synthetic oligonucleotide
cucaagcacguggagguga

SEQ ID NO: 163817 - RNA, 19 nt, Artificial Sequence
  Description of Artificial Sequence: Synthetic oligonucleotide
aacggcagcaaggugggcc

SEQ ID NO: 163818 - RNA, 19 nt, Artificial Sequence
  Description of Artificial Sequence: Synthetic oligonucleotide
ccggacggcacacccuacg

SEQ ID NO: 163819 - RNA, 19 nt, Artificial Sequence
  Description of Artificial Sequence: Synthetic oligonucleotide
guuaccgugcucaagacgg

SEQ ID NO: 163820 - RNA, 19 nt, Artificial Sequence
  Description of Artificial Sequence: Synthetic oligonucleotide
gcgggcgcuaacaccaccg

SEQ ID NO: 163821 - RNA, 19 nt, Artificial Sequence
  Description of Artificial Sequence: Synthetic oligonucleotide
gacaaggagcuagagguuc

SEQ ID NO: 163822 - RNA, 19 nt, Artificial Sequence
  Description of Artificial Sequence: Synthetic oligonucleotide
cucuccuugcacaacguca

SEQ ID NO: 163823 - RNA, 19 nt, Artificial Sequence
  Description of Artificial Sequence: Synthetic oligonucleotide
accuuugaggacgccgggg

SEQ ID NO: 163824 - RNA, 19 nt, Artificial Sequence
  Description of Artificial Sequence: Synthetic oligonucleotide
gaguacaccugccuggcgg

SEQ ID NO: 163825 - RNA, 19 nt, Artificial Sequence
  Description of Artificial Sequence: Synthetic oligonucleotide
ggcaauucuauuggguuuu

SEQ ID NO: 163826 - RNA, 19 nt, Artificial Sequence
  Description of Artificial Sequence: Synthetic oligonucleotide
ucucaucacucugcguggc

SEQ ID NO: 163827 - RNA, 19 nt, Artificial Sequence
  Description of Artificial Sequence: Synthetic oligonucleotide
cugguggugcugccagccg

SEQ ID NO: 163828 - RNA, 19 nt, Artificial Sequence
  Description of Artificial Sequence: Synthetic oligonucleotide
gaggaggagcugguggagg

SEQ ID NO: 163829 - RNA, 19 nt, Artificial Sequence
  Description of Artificial Sequence: Synthetic oligonucleotide
gcugacgaggcgggcagug

SEQ ID NO: 163830 - RNA, 19 nt, Artificial Sequence
  Description of Artificial Sequence: Synthetic oligonucleotide
guguaugcaggcauccuca

SEQ ID NO: 163831 - RNA, 19 nt, Artificial Sequence
  Description of Artificial Sequence: Synthetic oligonucleotide
agcuacggggugggcuucu

SEQ ID NO: 163832 - RNA, 19 nt, Artificial Sequence
  Description of Artificial Sequence: Synthetic oligonucleotide
uuccuguucauccuggugg

SEQ ID NO: 163833 - RNA, 19 nt, Artificial Sequence
  Description of Artificial Sequence: Synthetic oligonucleotide
guggcggcugugacgcucu

SEQ ID NO: 163834 - RNA, 19 nt, Artificial Sequence
  Description of Artificial Sequence: Synthetic oligonucleotide
ugccgccugcgcagccccc

SEQ ID NO: 163835 - RNA, 19 nt, Artificial Sequence
  Description of Artificial Sequence: Synthetic oligonucleotide
cccaagaaaggccugggcu

SEQ ID NO: 163836 - RNA, 19 nt, Artificial Sequence
  Description of Artificial Sequence: Synthetic oligonucleotide
ucccccaccgugcacaaga

SEQ ID NO: 163837 - RNA, 19 nt, Artificial Sequence
  Description of Artificial Sequence: Synthetic oligonucleotide
aucucccgcuucccgcuca

SEQ ID NO: 163838 - RNA, 19 nt, Artificial Sequence
  Description of Artificial Sequence: Synthetic oligonucleotide
aagcgacaggugucccugg

SEQ ID NO: 163839 - RNA, 19 nt, Artificial Sequence
  Description of Artificial Sequence: Synthetic oligonucleotide
gaguccaacgcguccauga

SEQ ID NO: 163840 - RNA, 19 nt, Artificial Sequence
  Description of Artificial Sequence: Synthetic oligonucleotide
agcuccaacacaccacugg

SEQ ID NO: 163841 - RNA, 19 nt, Artificial Sequence
  Description of Artificial Sequence: Synthetic oligonucleotide
gugcgcaucgcaaggcugu

SEQ ID NO: 163842 - RNA, 19 nt, Artificial Sequence
  Description of Artificial Sequence: Synthetic oligonucleotide
uccucaggggagggcccca

SEQ ID NO: 163843 - RNA, 19 nt, Artificial Sequence
  Description of Artificial Sequence: Synthetic oligonucleotide
acgcuggccaaugucuccg

SEQ ID NO: 163844 - RNA, 19 nt, Artificial Sequence
  Description of Artificial Sequence: Synthetic oligonucleotide
gagcucgagcugccugccg

SEQ ID NO: 163845 - RNA, 19 nt, Artificial Sequence
  Description of Artificial Sequence: Synthetic oligonucleotide
gaccccaaaugggagcugu

SEQ ID NO: 163846 - RNA, 19 nt, Artificial Sequence
  Description of Artificial Sequence: Synthetic oligonucleotide
ucucgggcccggcugaccc

SEQ ID NO: 163847 - RNA, 19 nt, Artificial Sequence
  Description of Artificial Sequence: Synthetic oligonucleotide
cugggcaagccccuugggg

SEQ ID NO: 163848 - RNA, 19 nt, Artificial Sequence
  Description of Artificial Sequence: Synthetic oligonucleotide
gagggcugcuucggccagg

SEQ ID NO: 163849 - RNA, 19 nt, Artificial Sequence
  Description of Artificial Sequence: Synthetic oligonucleotide
guggucauggcggaggcca

SEQ ID NO: 163850 - RNA, 19 nt, Artificial Sequence
  Description of Artificial Sequence: Synthetic oligonucleotide
aucggcauugacaaggacc

SEQ ID NO: 163851 - RNA, 19 nt, Artificial Sequence
  Description of Artificial Sequence: Synthetic oligonucleotide
cgggccgccaagccuguca

SEQ ID NO: 163852 - RNA, 19 nt, Artificial Sequence
  Description of Artificial Sequence: Synthetic oligonucleotide
accguagccgugaagaugc

SEQ ID NO: 163853 - RNA, 19 nt, Artificial Sequence
  Description of Artificial Sequence: Synthetic oligonucleotide
cugaaagacgaugccacug

SEQ ID NO: 163854 - RNA, 19 nt, Artificial Sequence
  Description of Artificial Sequence: Synthetic oligonucleotide
gacaaggaccugucggacc

SEQ ID NO: 163855 - RNA, 19 nt, Artificial Sequence
  Description of Artificial Sequence: Synthetic oligonucleotide
cuggugucugagauggaga

SEQ ID NO: 163856 - RNA, 19 nt, Artificial Sequence
  Description of Artificial Sequence: Synthetic oligonucleotide
aaacacaaaaacaucauca

SEQ ID NO: 163857 - RNA, 19 nt, Artificial Sequence
  Description of Artificial Sequence: Synthetic oligonucleotide
aaccugcugggcgccugca

SEQ ID NO: 163858 - RNA, 19 nt, Artificial Sequence
  Description of Artificial Sequence: Synthetic oligonucleotide
acgcagggcgggccccugu

SEQ ID NO: 163859 - RNA, 19 nt, Artificial Sequence
  Description of Artificial Sequence: Synthetic oligonucleotide
uacgugcugguggaguacg

SEQ ID NO: 163860 - RNA, 19 nt, Artificial Sequence
  Description of Artificial Sequence: Synthetic oligonucleotide
gcggccaaggguaaccugc

SEQ ID NO: 163861 - RNA, 19 nt, Artificial Sequence
  Description of Artificial Sequence: Synthetic oligonucleotide
cgggaguuucugcgggcgc

SEQ ID NO: 163862 - RNA, 19 nt, Artificial Sequence
  Description of Artificial Sequence: Synthetic oligonucleotide
cggcggcccccgggccugg

SEQ ID NO: 163863 - RNA, 19 nt, Artificial Sequence
  Description of Artificial Sequence: Synthetic oligonucleotide
gacuacuccuucgacaccu

SEQ ID NO: 163864 - RNA, 19 nt, Artificial Sequence
  Description of Artificial Sequence: Synthetic oligonucleotide
ugcaagccgcccgaggagc

SEQ ID NO: 163865 - RNA, 19 nt, Artificial Sequence
  Description of Artificial Sequence: Synthetic oligonucleotide
cagcucaccuucaaggacc

SEQ ID NO: 163866 - RNA, 19 nt, Artificial Sequence
  Description of Artificial Sequence: Synthetic oligonucleotide
cugguguccugugccuacc

SEQ ID NO: 163867 - RNA, 19 nt, Artificial Sequence
  Description of Artificial Sequence: Synthetic oligonucleotide
cagguggcccggggcaugg

SEQ ID NO: 163868 - RNA, 19 nt, Artificial Sequence
  Description of Artificial Sequence: Synthetic oligonucleotide
gaguacuuggccucccaga

SEQ ID NO: 163869 - RNA, 19 nt, Artificial Sequence
  Description of Artificial Sequence: Synthetic oligonucleotide
aagugcauccacagggacc

SEQ ID NO: 163870 - RNA, 19 nt, Artificial Sequence
  Description of Artificial Sequence: Synthetic oligonucleotide
cuggcugcccgcaaugugc

SEQ ID NO: 163871 - RNA, 19 nt, Artificial Sequence
  Description of Artificial Sequence: Synthetic oligonucleotide
cuggugaccgaggacaacg

SEQ ID NO: 163872 - RNA, 19 nt, Artificial Sequence
  Description of Artificial Sequence: Synthetic oligonucleotide
gugaugaagaucgcagacu

SEQ ID NO: 163873 - RNA, 19 nt, Artificial Sequence
  Description of Artificial Sequence: Synthetic oligonucleotide
uucgggcuggcccgggacg

SEQ ID NO: 163874 - RNA, 19 nt, Artificial Sequence
  Description of Artificial Sequence: Synthetic oligonucleotide
gugcacaaccucgacuacu

SEQ ID NO: 163875 - RNA, 19 nt, Artificial Sequence
  Description of Artificial Sequence: Synthetic oligonucleotide
uacaagaagacaaccaacg

SEQ ID NO: 163876 - RNA, 19 nt, Artificial Sequence
  Description of Artificial Sequence: Synthetic oligonucleotide
ggccggcugcccgugaagu

SEQ ID NO: 163877 - RNA, 19 nt, Artificial Sequence
  Description of Artificial Sequence: Synthetic oligonucleotide
uggauggcgccugaggccu

SEQ ID NO: 163878 - RNA, 19 nt, Artificial Sequence
  Description of Artificial Sequence: Synthetic oligonucleotide
uuguuugaccgagucuaca

SEQ ID NO: 163879 - RNA, 19 nt, Artificial Sequence
  Description of Artificial Sequence: Synthetic oligonucleotide
acucaccagagugacgucu

SEQ ID NO: 163880 - RNA, 19 nt, Artificial Sequence
  Description of Artificial Sequence: Synthetic oligonucleotide
ugguccuuugggguccugc

SEQ ID NO: 163881 - RNA, 19 nt, Artificial Sequence
  Description of Artificial Sequence: Synthetic oligonucleotide
cucugggagaucuucacgc

SEQ ID NO: 163882 - RNA, 19 nt, Artificial Sequence
  Description of Artificial Sequence: Synthetic oligonucleotide
cuggggggcuccccguacc

SEQ ID NO: 163883 - RNA, 19 nt, Artificial Sequence
  Description of Artificial Sequence: Synthetic oligonucleotide
cccggcaucccuguggagg

SEQ ID NO: 163884 - RNA, 19 nt, Artificial Sequence
  Description of Artificial Sequence: Synthetic oligonucleotide
gagcucuucaagcugcuga

SEQ ID NO: 163885 - RNA, 19 nt, Artificial Sequence
  Description of Artificial Sequence: Synthetic oligonucleotide
aaggagggccaccgcaugg

SEQ ID NO: 163886 - RNA, 19 nt, Artificial Sequence
  Description of Artificial Sequence: Synthetic oligonucleotide
gacaagcccgccaacugca

SEQ ID NO: 163887 - RNA, 19 nt, Artificial Sequence
  Description of Artificial Sequence: Synthetic oligonucleotide
acacacgaccuguacauga

SEQ ID NO: 163888 - RNA, 19 nt, Artificial Sequence
  Description of Artificial Sequence: Synthetic oligonucleotide
aucaugcgggagugcuggc

SEQ ID NO: 163889 - RNA, 19 nt, Artificial Sequence
  Description of Artificial Sequence: Synthetic oligonucleotide
caugccgcgcccucccaga

SEQ ID NO: 163890 - RNA, 19 nt, Artificial Sequence
  Description of Artificial Sequence: Synthetic oligonucleotide
aggcccaccuucaagcagc

SEQ ID NO: 163891 - RNA, 19 nt, Artificial Sequence
  Description of Artificial Sequence: Synthetic oligonucleotide
cugguggaggaccuggacc

SEQ ID NO: 163892 - RNA, 19 nt, Artificial Sequence
  Description of Artificial Sequence: Synthetic oligonucleotide
cguguccuuaccgugacgu

SEQ ID NO: 163893 - RNA, 19 nt, Artificial Sequence
  Description of Artificial Sequence: Synthetic oligonucleotide
uccaccgacgaguaccugg

SEQ ID NO: 163894 - RNA, 19 nt, Artificial Sequence
  Description of Artificial Sequence: Synthetic oligonucleotide
gaccugucggcgccuuucg

SEQ ID NO: 163895 - RNA, 19 nt, Artificial Sequence
  Description of Artificial Sequence: Synthetic oligonucleotide
gagcaguacuccccgggug

SEQ ID NO: 163896 - RNA, 19 nt, Artificial Sequence
  Description of Artificial Sequence: Synthetic oligonucleotide
ggccaggacacccccagcu

SEQ ID NO: 163897 - RNA, 19 nt, Artificial Sequence
  Description of Artificial Sequence: Synthetic oligonucleotide
uccagcuccucaggggacg

SEQ ID NO: 163898 - RNA, 19 nt, Artificial Sequence
  Description of Artificial Sequence: Synthetic oligonucleotide
gacuccguguuugcccacg

SEQ ID NO: 163899 - RNA, 19 nt, Artificial Sequence
  Description of Artificial Sequence: Synthetic oligonucleotide
gaccugcugcccccggccc

SEQ ID NO: 163900 - RNA, 19 nt, Artificial Sequence
  Description of Artificial Sequence: Synthetic oligonucleotide
ccacccagcagugggggcu

SEQ ID NO: 163901 - RNA, 19 nt, Artificial Sequence
  Description of Artificial Sequence: Synthetic oligonucleotide
ucgcggacgugaagggcca

SEQ ID NO: 163902 - RNA, 19 nt, Artificial Sequence
  Description of Artificial Sequence: Synthetic oligonucleotide
acugguccccaacaaugug

SEQ ID NO: 163903 - RNA, 19 nt, Artificial Sequence
  Description of Artificial Sequence: Synthetic oligonucleotide
gaggggucccuagcagccc

SEQ ID NO: 163904 - RNA, 19 nt, Artificial Sequence
  Description of Artificial Sequence: Synthetic oligonucleotide
cucccugcugcuggugcac

SEQ ID NO: 163905 - RNA, 19 nt, Artificial Sequence
  Description of Artificial Sequence: Synthetic oligonucleotide
cagccacuccccggcauga

SEQ ID NO: 163906 - RNA, 19 nt, Artificial Sequence
  Description of Artificial Sequence: Synthetic oligonucleotide
agacucagugcagauggag

SEQ ID NO: 163907 - RNA, 19 nt, Artificial Sequence
  Description of Artificial Sequence: Synthetic oligonucleotide
gagacagcuacacagagcu

SEQ ID NO: 163908 - RNA, 19 nt, Artificial Sequence
  Description of Artificial Sequence: Synthetic oligonucleotide
uuuggucugugugugugug

SEQ ID NO: 163909 - RNA, 19 nt, Artificial Sequence
  Description of Artificial Sequence: Synthetic oligonucleotide
gugugcgugugugugugug

SEQ ID NO: 163910 - RNA, 19 nt, Artificial Sequence
  Description of Artificial Sequence: Synthetic oligonucleotide
gugugcacauccgcgugug

SEQ ID NO: 163911 - RNA, 19 nt, Artificial Sequence
  Description of Artificial Sequence: Synthetic oligonucleotide
gccugugugcgugcgcauc

SEQ ID NO: 163912 - RNA, 19 nt, Artificial Sequence
  Description of Artificial Sequence: Synthetic oligonucleotide
cuugccuccaggugcagag

SEQ ID NO: 163913 - RNA, 19 nt, Artificial Sequence
  Description of Artificial Sequence: Synthetic oligonucleotide
gguacccuggguguccccg

SEQ ID NO: 163914 - RNA, 19 nt, Artificial Sequence
  Description of Artificial Sequence: Synthetic oligonucleotide
gcugcugugcaacggucuc

SEQ ID NO: 163915 - RNA, 19 nt, Artificial Sequence
  Description of Artificial Sequence: Synthetic oligonucleotide
ccugacuggugcugcagca

SEQ ID NO: 163916 - RNA, 19 nt, Artificial Sequence
  Description of Artificial Sequence: Synthetic oligonucleotide
accgaggggccuuuguucu

SEQ ID NO: 163917 - RNA, 19 nt, Artificial Sequence
  Description of Artificial Sequence: Synthetic oligonucleotide
uggggggacccagugcaga

SEQ ID NO: 163918 - RNA, 19 nt, Artificial Sequence
  Description of Artificial Sequence: Synthetic oligonucleotide
aauguaagugggcccaccc

SEQ ID NO: 163919 - RNA, 19 nt, Artificial Sequence
  Description of Artificial Sequence: Synthetic oligonucleotide
cggugggaccccguggggc

SEQ ID NO: 163920 - RNA, 19 nt, Artificial Sequence
  Description of Artificial Sequence: Synthetic oligonucleotide
cagggagcugggcccgaca

SEQ ID NO: 163921 - RNA, 19 nt, Artificial Sequence
  Description of Artificial Sequence: Synthetic oligonucleotide
auggcucggccucugccuu

SEQ ID NO: 163922 - RNA, 19 nt, Artificial Sequence
  Description of Artificial Sequence: Synthetic oligonucleotide
uugcaccacgggacaucac

SEQ ID NO: 163923 - RNA, 19 nt, Artificial Sequence
  Description of Artificial Sequence: Synthetic oligonucleotide
cagggugcgcucggccccu

SEQ ID NO: 163924 - RNA, 19 nt, Artificial Sequence
  Description of Artificial Sequence: Synthetic oligonucleotide
ucccacacccaaagcugag

SEQ ID NO: 163925 - RNA, 19 nt, Artificial Sequence
  Description of Artificial Sequence: Synthetic oligonucleotide
gccugcagggaagccccac

SEQ ID NO: 163926 - RNA, 19 nt, Artificial Sequence
  Description of Artificial Sequence: Synthetic oligonucleotide
cauguccagcaccuugugc

SEQ ID NO: 163927 - RNA, 19 nt, Artificial Sequence
  Description of Artificial Sequence: Synthetic oligonucleotide
ccugggguguuaguggcac

SEQ ID NO: 163928 - RNA, 19 nt, Artificial Sequence
  Description of Artificial Sequence: Synthetic oligonucleotide
ccgccuccccaccuccagg

SEQ ID NO: 163929 - RNA, 19 nt, Artificial Sequence
  Description of Artificial Sequence: Synthetic oligonucleotide
gcuuucccacuucccaccc

SEQ ID NO: 163930 - RNA, 19 nt, Artificial Sequence
  Description of Artificial Sequence: Synthetic oligonucleotide
cugccccucagagacugaa

SEQ ID NO: 163931 - RNA, 19 nt, Artificial Sequence
  Description of Artificial Sequence: Synthetic oligonucleotide
aauuacggguaccugaaga

SEQ ID NO: 163932 - RNA, 19 nt, Artificial Sequence
  Description of Artificial Sequence: Synthetic oligonucleotide
augggagccuuuaccuuuu

SEQ ID NO: 163933 - RNA, 19 nt, Artificial Sequence
  Description of Artificial Sequence: Synthetic oligonucleotide
uaugcaaaagguuuauucc

SEQ ID NO: 163934 - RNA, 19 nt, Artificial Sequence
  Description of Artificial Sequence: Synthetic oligonucleotide
cggaaacuaguguacauuu

SEQ ID NO: 163935 - RNA, 19 nt, Artificial Sequence
  Description of Artificial Sequence: Synthetic oligonucleotide
ucuauaaauagaugcugug

SEQ ID NO: 163936 - RNA, 19 nt, Artificial Sequence
  Description of Artificial Sequence: Synthetic oligonucleotide
guauaugguauauauacau

SEQ ID NO: 163937 - RNA, 19 nt, Artificial Sequence
  Description of Artificial Sequence: Synthetic oligonucleotide
uauauauauauaacauaua

SEQ ID NO: 163938 - RNA, 19 nt, Artificial Sequence
  Description of Artificial Sequence: Synthetic oligonucleotide
auggaagaggaaaaggcug

SEQ ID NO: 163939 - RNA, 19 nt, Artificial Sequence
  Description of Artificial Sequence: Synthetic oligonucleotide
gguacaacggaggccugcg

SEQ ID NO: 163940 - RNA, 19 nt, Artificial Sequence
  Description of Artificial Sequence: Synthetic oligonucleotide
gacccugggggcacaggag

SEQ ID NO: 163941 - RNA, 19 nt, Artificial Sequence
  Description of Artificial Sequence: Synthetic oligonucleotide
ggcaggcauggcccugggc

SEQ ID NO: 163942 - RNA, 19 nt, Artificial Sequence
  Description of Artificial Sequence: Synthetic oligonucleotide
cggggcgugggggggcgug

SEQ ID NO: 163943 - RNA, 19 nt, Artificial Sequence
  Description of Artificial Sequence: Synthetic oligonucleotide
ggagggaggccccaggggu

SEQ ID NO: 163944 - RNA, 19 nt, Artificial Sequence
  Description of Artificial Sequence: Synthetic oligonucleotide
ucucacccaugcaagcaga

SEQ ID NO: 163945 - RNA, 19 nt, Artificial Sequence
  Description of Artificial Sequence: Synthetic oligonucleotide
aggaccagggcuuuuucug

SEQ ID NO: 163946 - RNA, 19 nt, Artificial Sequence
  Description of Artificial Sequence: Synthetic oligonucleotide
ggcaccgcaguuuuguuuu

SEQ ID NO: 163947 - RNA, 19 nt, Artificial Sequence
  Description of Artificial Sequence: Synthetic oligonucleotide
uaaaacuggaccuguauau

SEQ ID NO: 163948 - RNA, 19 nt, Artificial Sequence
  Description of Artificial Sequence: Synthetic oligonucleotide
uuuguaaagcuauuuaugg

SEQ ID NO: 163949 - RNA, 19 nt, Artificial Sequence
  Description of Artificial Sequence: Synthetic oligonucleotide
ggccccuggcacucuuguu

SEQ ID NO: 163950 - RNA, 19 nt, Artificial Sequence
  Description of Artificial Sequence: Synthetic oligonucleotide
ucccacaccccaacacuuc

SEQ ID NO: 163951 - RNA, 19 nt, Artificial Sequence
  Description of Artificial Sequence: Synthetic oligonucleotide
ccagcauuuagcuggccac

SEQ ID NO: 163952 - RNA, 19 nt, Artificial Sequence
  Description of Artificial Sequence: Synthetic oligonucleotide
cauggcggagaguuuuaau

SEQ ID NO: 163953 - RNA, 19 nt, Artificial Sequence
  Description of Artificial Sequence: Synthetic oligonucleotide
uuuuuaacuuauugacaac

SEQ ID NO: 163954 - RNA, 19 nt, Artificial Sequence
  Description of Artificial Sequence: Synthetic oligonucleotide
ccgagaagguuuaucccgc

SEQ ID NO: 163955 - RNA, 19 nt, Artificial Sequence
  Description of Artificial Sequence: Synthetic oligonucleotide
ccgauagagggacggccaa

SEQ ID NO: 163956 - RNA, 19 nt, Artificial Sequence
  Description of Artificial Sequence: Synthetic oligonucleotide
agaauguacguccagccug

SEQ ID NO: 163957 - RNA, 19 nt, Artificial Sequence
  Description of Artificial Sequence: Synthetic oligonucleotide
gccccggagcuggaggauc

SEQ ID NO: 163958 - RNA, 19 nt, Artificial Sequence
  Description of Artificial Sequence: Synthetic oligonucleotide
ccccuccaagccuaaaagg

SEQ ID NO: 163959 - RNA, 19 nt, Artificial Sequence
  Description of Artificial Sequence: Synthetic oligonucleotide
guuguuaauaguuggaggu

SEQ ID NO: 163960 - RNA, 19 nt, Artificial Sequence
  Description of Artificial Sequence: Synthetic oligonucleotide
ugauuccagugaagauauu

SEQ ID NO: 163961 - RNA, 19 nt, Artificial Sequence
  Description of Artificial Sequence: Synthetic oligonucleotide
uuuauuugcuuuguccuuu

SEQ ID NO: 163962 - RNA, 19 nt, Artificial Sequence
  Description of Artificial Sequence: Synthetic oligonucleotide
uuucaggagaauuagauuu

SEQ ID NO: 163963 - RNA, 19 nt, Artificial Sequence
  Description of Artificial Sequence: Synthetic oligonucleotide
ucuauaggauuuuucuuua

SEQ ID NO: 163964 - RNA, 19 nt, Artificial Sequence
  Description of Artificial Sequence: Synthetic oligonucleotide
aggagauuuauuuuuugga

SEQ ID NO: 163965 - RNA, 19 nt, Artificial Sequence
  Description of Artificial Sequence: Synthetic oligonucleotide
acuucaaagcaagcuggua

SEQ ID NO: 163966 - RNA, 19 nt, Artificial Sequence
  Description of Artificial Sequence: Synthetic oligonucleotide
auuuucauacaaauucuuc

SEQ ID NO: 163967 - RNA, 19 nt, Artificial Sequence
  Description of Artificial Sequence: Synthetic oligonucleotide
cuaauugcuguguguccca

SEQ ID NO: 163968 - RNA, 19 nt, Artificial Sequence
  Description of Artificial Sequence: Synthetic oligonucleotide
aggcagggagacgguuucc

SEQ ID NO: 163969 - RNA, 19 nt, Artificial Sequence
  Description of Artificial Sequence: Synthetic oligonucleotide
cagggaggggccggcccug

SEQ ID NO: 163970 - RNA, 19 nt, Artificial Sequence
  Description of Artificial Sequence: Synthetic oligonucleotide
gugugcagguuccgauguu

SEQ ID NO: 163971 - RNA, 19 nt, Artificial Sequence
  Description of Artificial Sequence: Synthetic oligonucleotide
uauuagauguuacaaguuu

SEQ ID NO: 163972 - RNA, 19 nt, Artificial Sequence
  Description of Artificial Sequence: Synthetic oligonucleotide
uauauauaucuauauauau

SEQ ID NO: 163973 - RNA, 19 nt, Artificial Sequence
  Description of Artificial Sequence: Synthetic oligonucleotide
uaauuuauugaguuuuuac

SEQ ID NO: 163974 - RNA, 19 nt, Artificial Sequence
  Description of Artificial Sequence: Synthetic oligonucleotide
caagauguauuuguuguag

SEQ ID NO: 163975 - RNA, 19 nt, Artificial Sequence
  Description of Artificial Sequence: Synthetic oligonucleotide
gacuuaacacuucuuacgc

SEQ ID NO: 163976 - RNA, 19 nt, Artificial Sequence
  Description of Artificial Sequence: Synthetic oligonucleotide
caaugcuucuagaguuuua

SEQ ID NO: 163977 - RNA, 19 nt, Artificial Sequence
  Description of Artificial Sequence: Synthetic oligonucleotide
auagccuggacugcuaccu

SEQ ID NO: 163978 - RNA, 19 nt, Artificial Sequence
  Description of Artificial Sequence: Synthetic oligonucleotide
uuucaaagcuuggagggaa

SEQ ID NO: 163979 - RNA, 19 nt, Artificial Sequence
  Description of Artificial Sequence: Synthetic oligonucleotide
agccgugaauucaguuggu

SEQ ID NO: 163980 - RNA, 19 nt, Artificial Sequence
  Description of Artificial Sequence: Synthetic oligonucleotide
uucguucuguacuguuacu

SEQ ID NO: 163981 - RNA, 19 nt, Artificial Sequence
  Description of Artificial Sequence: Synthetic oligonucleotide
ugggcccugagucugggca

SEQ ID NO: 163982 - RNA, 19 nt, Artificial Sequence
  Description of Artificial Sequence: Synthetic oligonucleotide
agcugucccuugcuugccu

SEQ ID NO: 163983 - RNA, 19 nt, Artificial Sequence
  Description of Artificial Sequence: Synthetic oligonucleotide
ugcagggccauggcucagg

SEQ ID NO: 163984 - RNA, 19 nt, Artificial Sequence
  Description of Artificial Sequence: Synthetic oligonucleotide
gguggucucuucuuggggc

SEQ ID NO: 163985 - RNA, 19 nt, Artificial Sequence
  Description of Artificial Sequence: Synthetic oligonucleotide
cccagugcaugguggccag

SEQ ID NO: 163986 - RNA, 19 nt, Artificial Sequence
  Description of Artificial Sequence: Synthetic oligonucleotide
gaggugucacccaaaccgg

SEQ ID NO: 163987 - RNA, 19 nt, Artificial Sequence
  Description of Artificial Sequence: Synthetic oligonucleotide
gcaggugcgauuuuguuaa

SEQ ID NO: 163988 - RNA, 19 nt, Artificial Sequence
  Description of Artificial Sequence: Synthetic oligonucleotide
acccagcgacgaacuuucc

SEQ ID NO: 163989 - RNA, 19 nt, Artificial Sequence
  Description of Artificial Sequence: Synthetic oligonucleotide
cgaaaaauaaagacaccug

SEQ ID NO: 163990 - RNA, 19 nt, Artificial Sequence
  Description of Artificial Sequence: Synthetic oligonucleotide
gguugcuaaccugaaaaaa

SEQ ID NO: 163991 - RNA, 19 nt, Artificial Sequence
  Description of Artificial Sequence: Synthetic oligonucleotide
guuaccgugcucaaggugu

SEQ ID NO: 163992 - RNA, 19 nt, Artificial Sequence
  Description of Artificial Sequence: Synthetic oligonucleotide
ucccuggaguccaacgcgu

SEQ ID NO: 163993 - RNA, 19 nt, Artificial Sequence
  Description of Artificial Sequence: Synthetic oligonucleotide
uccaugagcuccaacacac

SEQ ID NO: 163994 - RNA, 19 nt, Artificial Sequence
  Description of Artificial Sequence: Synthetic oligonucleotide
ccacuggugcgcaucgcaa

SEQ ID NO: 163995 - RNA, 19 nt, Artificial Sequence
  Description of Artificial Sequence: Synthetic oligonucleotide
aggcuguccucaggggagg

SEQ ID NO: 163996 - RNA, 19 nt, Artificial Sequence
  Description of Artificial Sequence: Synthetic oligonucleotide
ggccccacgcuggccaaug

SEQ ID NO: 163997 - RNA, 19 nt, Artificial Sequence
  Description of Artificial Sequence: Synthetic oligonucleotide
gucuccgagcucgagcugc

SEQ ID NO: 163998 - RNA, 19 nt, Artificial Sequence
  Description of Artificial Sequence: Synthetic oligonucleotide
ccugccgaccccaaauggg

SEQ ID NO: 163999 - RNA, 19 nt, Artificial Sequence
  Description of Artificial Sequence: Synthetic oligonucleotide
gagcugucucgggcccggc

SEQ ID NO: 164000 - RNA, 19 nt, Artificial Sequence
  Description of Artificial Sequence: Synthetic oligonucleotide
cugacccugggcaagcccc

SEQ ID NO: 164001 - RNA, 19 nt, Artificial Sequence
  Description of Artificial Sequence: Synthetic oligonucleotide
cuuggggagggcugcuucg

SEQ ID NO: 164002 - RNA, 19 nt, Artificial Sequence
  Description of Artificial Sequence: Synthetic oligonucleotide
ggccagguggucauggcgg

SEQ ID NO: 164003 - RNA, 19 nt, Artificial Sequence
  Description of Artificial Sequence: Synthetic oligonucleotide
gaggccaucggcauugaca

SEQ ID NO: 164004 - RNA, 19 nt, Artificial Sequence
  Description of Artificial Sequence: Synthetic oligonucleotide
aaggaccgggccgccaagc

SEQ ID NO: 164005 - RNA, 19 nt, Artificial Sequence
  Description of Artificial Sequence: Synthetic oligonucleotide
ccugucaccguagccguga

SEQ ID NO: 164006 - RNA, 19 nt, Artificial Sequence
  Description of Artificial Sequence: Synthetic oligonucleotide
aagaugcugaaagacgaug

SEQ ID NO: 164007 - RNA, 19 nt, Artificial Sequence
  Description of Artificial Sequence: Synthetic oligonucleotide
gccacugacaaggaccugu

SEQ ID NO: 164008 - RNA, 19 nt, Artificial Sequence
  Description of Artificial Sequence: Synthetic oligonucleotide
ucggaccuggugucugaga

SEQ ID NO: 164009 - RNA, 19 nt, Artificial Sequence
  Description of Artificial Sequence: Synthetic oligonucleotide
aucgggaaacacaaaaaca

SEQ ID NO: 164010 - RNA, 19 nt, Artificial Sequence
  Description of Artificial Sequence: Synthetic oligonucleotide
aucaucaaccugcugggcg

SEQ ID NO: 164011 - RNA, 19 nt, Artificial Sequence
  Description of Artificial Sequence: Synthetic oligonucleotide
gccugcacgcagggcgggc

SEQ ID NO: 164012 - RNA, 19 nt, Artificial Sequence
  Description of Artificial Sequence: Synthetic oligonucleotide
ccccuguacgugcuggugg

SEQ ID NO: 164013 - RNA, 19 nt, Artificial Sequence
  Description of Artificial Sequence: Synthetic oligonucleotide
gaguacgcggccaagggua

SEQ ID NO: 164014 - RNA, 19 nt, Artificial Sequence
  Description of Artificial Sequence: Synthetic oligonucleotide
aaccugcgggaguuucugc

SEQ ID NO: 164015 - RNA, 19 nt, Artificial Sequence
  Description of Artificial Sequence: Synthetic oligonucleotide
cgggcgcggcggcccccgg

SEQ ID NO: 164016 - RNA, 19 nt, Artificial Sequence
  Description of Artificial Sequence: Synthetic oligonucleotide
ggccuggacuacuccuucg

SEQ ID NO: 164017 - RNA, 19 nt, Artificial Sequence
  Description of Artificial Sequence: Synthetic oligonucleotide
gacaccugcaagccgcccg

SEQ ID NO: 164018 - RNA, 19 nt, Artificial Sequence
  Description of Artificial Sequence: Synthetic oligonucleotide
gaggagcagcucaccuuca

SEQ ID NO: 164019 - RNA, 19 nt, Artificial Sequence
  Description of Artificial Sequence: Synthetic oligonucleotide
aaggaccugguguccugug

SEQ ID NO: 164020 - RNA, 19 nt, Artificial Sequence
  Description of Artificial Sequence: Synthetic oligonucleotide
gccuaccagguggcccggg

SEQ ID NO: 164021 - RNA, 19 nt, Artificial Sequence
  Description of Artificial Sequence: Synthetic oligonucleotide
ggcauggaguacuuggccu

SEQ ID NO: 164022 - RNA, 19 nt, Artificial Sequence
  Description of Artificial Sequence: Synthetic oligonucleotide
ucccagaagugcauccaca

SEQ ID NO: 164023 - RNA, 19 nt, Artificial Sequence
  Description of Artificial Sequence: Synthetic oligonucleotide
agggaccuggcugcccgca

SEQ ID NO: 164024 - RNA, 19 nt, Artificial Sequence
  Description of Artificial Sequence: Synthetic oligonucleotide
aaugugcuggugaccgagg

SEQ ID NO: 164025 - RNA, 19 nt, Artificial Sequence
  Description of Artificial Sequence: Synthetic oligonucleotide
gacaacgugaugaagaucg

SEQ ID NO: 164026 - RNA, 19 nt, Artificial Sequence
  Description of Artificial Sequence: Synthetic oligonucleotide
gcagacuucgggcuggccc

SEQ ID NO: 164027 - RNA, 19 nt, Artificial Sequence
  Description of Artificial Sequence: Synthetic oligonucleotide
cgggacgugcacaaccucg

SEQ ID NO: 164028 - RNA, 19 nt, Artificial Sequence
  Description of Artificial Sequence: Synthetic oligonucleotide
gacuacuacaagaagacaa

SEQ ID NO: 164029 - RNA, 19 nt, Artificial Sequence
  Description of Artificial Sequence: Synthetic oligonucleotide
accaacggccggcugcccg

SEQ ID NO: 164030 - RNA, 19 nt, Artificial Sequence
  Description of Artificial Sequence: Synthetic oligonucleotide
gugaaguggauggcgccug

SEQ ID NO: 164031 - RNA, 19 nt, Artificial Sequence
  Description of Artificial Sequence: Synthetic oligonucleotide
gaggccuuguuugaccgag

SEQ ID NO: 164032 - RNA, 19 nt, Artificial Sequence
  Description of Artificial Sequence: Synthetic oligonucleotide
gucuacacucaccagagug

SEQ ID NO: 164033 - RNA, 19 nt, Artificial Sequence
  Description of Artificial Sequence: Synthetic oligonucleotide
gacgucugguccuuugggg

SEQ ID NO: 164034 - RNA, 19 nt, Artificial Sequence
  Description of Artificial Sequence: Synthetic oligonucleotide
guccugcucugggagaucu

SEQ ID NO: 164035 - RNA, 19 nt, Artificial Sequence
  Description of Artificial Sequence: Synthetic oligonucleotide
uucacgcuggggggcuccc

SEQ ID NO: 164036 - RNA, 19 nt, Artificial Sequence
  Description of Artificial Sequence: Synthetic oligonucleotide
ccguaccccggcaucccug

SEQ ID NO: 164037 - RNA, 19 nt, Artificial Sequence
  Description of Artificial Sequence: Synthetic oligonucleotide
guggaggagcucuucaagc

SEQ ID NO: 164038 - RNA, 19 nt, Artificial Sequence
  Description of Artificial Sequence: Synthetic oligonucleotide
cugcugaaggagggccacc

SEQ ID NO: 164039 - RNA, 19 nt, Artificial Sequence
  Description of Artificial Sequence: Synthetic oligonucleotide
cgcauggacaagcccgcca

SEQ ID NO: 164040 - RNA, 19 nt, Artificial Sequence
  Description of Artificial Sequence: Synthetic oligonucleotide
aacugcacacacgaccugu

SEQ ID NO: 164041 - RNA, 19 nt, Artificial Sequence
  Description of Artificial Sequence: Synthetic oligonucleotide
uacaugaucaugcgggagu

SEQ ID NO: 164042 - RNA, 19 nt, Artificial Sequence
  Description of Artificial Sequence: Synthetic oligonucleotide
ugcuggcaugccgcgcccu

SEQ ID NO: 164043 - RNA, 19 nt, Artificial Sequence
  Description of Artificial Sequence: Synthetic oligonucleotide
ucccagaggcccaccuuca

SEQ ID NO: 164044 - RNA, 19 nt, Artificial Sequence
  Description of Artificial Sequence: Synthetic oligonucleotide
aagcagcugguggaggacc

SEQ ID NO: 164045 - RNA, 19 nt, Artificial Sequence
  Description of Artificial Sequence: Synthetic oligonucleotide
cuggaccguguccuuaccg

SEQ ID NO: 164046 - RNA, 19 nt, Artificial Sequence
  Description of Artificial Sequence: Synthetic oligonucleotide
gugacguccaccgacgagu

SEQ ID NO: 164047 - RNA, 19 nt, Artificial Sequence
  Description of Artificial Sequence: Synthetic oligonucleotide
uaccuggaccugucggcgc

SEQ ID NO: 164048 - RNA, 19 nt, Artificial Sequence
  Description of Artificial Sequence: Synthetic oligonucleotide
ccuuucgagcaguacuccc

SEQ ID NO: 164049 - RNA, 19 nt, Artificial Sequence
  Description of Artificial Sequence: Synthetic oligonucleotide
ccggguggccaggacaccc

SEQ ID NO: 164050 - RNA, 19 nt, Artificial Sequence
  Description of Artificial Sequence: Synthetic oligonucleotide
cccagcuccagcuccucag

SEQ ID NO: 164051 - RNA, 19 nt, Artificial Sequence
  Description of Artificial Sequence: Synthetic oligonucleotide
ggggacgacuccguguuug

SEQ ID NO: 164052 - RNA, 19 nt, Artificial Sequence
  Description of Artificial Sequence: Synthetic oligonucleotide
gcccacgaccugcugcccc

SEQ ID NO: 164053 - RNA, 19 nt, Artificial Sequence
  Description of Artificial Sequence: Synthetic oligonucleotide
ccggccccacccagcagug

SEQ ID NO: 164054 - RNA, 19 nt, Artificial Sequence
  Description of Artificial Sequence: Synthetic oligonucleotide
gggggcucgcggacgugaa

SEQ ID NO: 164055 - RNA, 19 nt, Artificial Sequence
  Description of Artificial Sequence: Synthetic oligonucleotide
agggccacugguccccaac

SEQ ID NO: 164056 - RNA, 19 nt, Artificial Sequence
  Description of Artificial Sequence: Synthetic oligonucleotide
caaugugaggggucccuag

SEQ ID NO: 164057 - RNA, 19 nt, Artificial Sequence
  Description of Artificial Sequence: Synthetic oligonucleotide
gcagcccucccugcugcug

SEQ ID NO: 164058 - RNA, 19 nt, Artificial Sequence
  Description of Artificial Sequence: Synthetic oligonucleotide
ggugcacagccacuccccg

SEQ ID NO: 164059 - RNA, 19 nt, Artificial Sequence
  Description of Artificial Sequence: Synthetic oligonucleotide
ggcaugagacucagugcag

SEQ ID NO: 164060 - RNA, 19 nt, Artificial Sequence
  Description of Artificial Sequence: Synthetic oligonucleotide
gauggagagacagcuacac

SEQ ID NO: 164061 - RNA, 19 nt, Artificial Sequence
  Description of Artificial Sequence: Synthetic oligonucleotide
cagagcuuuggucugugug

SEQ ID NO: 164062 - RNA, 19 nt, Artificial Sequence
  Description of Artificial Sequence: Synthetic oligonucleotide
gugugugugugcgugugug

SEQ ID NO: 164063 - RNA, 19 nt, Artificial Sequence
  Description of Artificial Sequence: Synthetic oligonucleotide
gugugugugugcacauccg

SEQ ID NO: 164064 - RNA, 19 nt, Artificial Sequence
  Description of Artificial Sequence: Synthetic oligonucleotide
gcgugugccugugugcgug

SEQ ID NO: 164065 - RNA, 19 nt, Artificial Sequence
  Description of Artificial Sequence: Synthetic oligonucleotide
gcgcaucuugccuccaggu

SEQ ID NO: 164066 - RNA, 19 nt, Artificial Sequence
  Description of Artificial Sequence: Synthetic oligonucleotide
ugcagagguacccugggug

SEQ ID NO: 164067 - RNA, 19 nt, Artificial Sequence
  Description of Artificial Sequence: Synthetic oligonucleotide
guccccgcugcugugcaac

SEQ ID NO: 164068 - RNA, 19 nt, Artificial Sequence
  Description of Artificial Sequence: Synthetic oligonucleotide
cggucuccugacuggugcu

SEQ ID NO: 164069 - RNA, 19 nt, Artificial Sequence
  Description of Artificial Sequence: Synthetic oligonucleotide
ugcagcaccgaggggccuu

SEQ ID NO: 164070 - RNA, 19 nt, Artificial Sequence
  Description of Artificial Sequence: Synthetic oligonucleotide
uuguucuggggggacccag

SEQ ID NO: 164071 - RNA, 19 nt, Artificial Sequence
  Description of Artificial Sequence: Synthetic oligonucleotide
gugcagaauguaagugggc

SEQ ID NO: 164072 - RNA, 19 nt, Artificial Sequence
  Description of Artificial Sequence: Synthetic oligonucleotide
cccacccggugggaccccg

SEQ ID NO: 164073 - RNA, 19 nt, Artificial Sequence
  Description of Artificial Sequence: Synthetic oligonucleotide
guggggcagggagcugggc

SEQ ID NO: 164074 - RNA, 19 nt, Artificial Sequence
  Description of Artificial Sequence: Synthetic oligonucleotide
cccgacauggcucggccuc

SEQ ID NO: 164075 - RNA, 19 nt, Artificial Sequence
  Description of Artificial Sequence: Synthetic oligonucleotide
cugccuuugcaccacggga

SEQ ID NO: 164076 - RNA, 19 nt, Artificial Sequence
  Description of Artificial Sequence: Synthetic oligonucleotide
acaucacagggugcgcucg

SEQ ID NO: 164077 - RNA, 19 nt, Artificial Sequence
  Description of Artificial Sequence: Synthetic oligonucleotide
ggccccucccacacccaaa

SEQ ID NO: 164078 - RNA, 19 nt, Artificial Sequence
  Description of Artificial Sequence: Synthetic oligonucleotide
agcugagccugcagggaag

SEQ ID NO: 164079 - RNA, 19 nt, Artificial Sequence
  Description of Artificial Sequence: Synthetic oligonucleotide
gccccacauguccagcacc

SEQ ID NO: 164080 - RNA, 19 nt, Artificial Sequence
  Description of Artificial Sequence: Synthetic oligonucleotide
cuugugccugggguguuag

SEQ ID NO: 164081 - RNA, 19 nt, Artificial Sequence
  Description of Artificial Sequence: Synthetic oligonucleotide
guggcaccgccuccccacc

SEQ ID NO: 164082 - RNA, 19 nt, Artificial Sequence
  Description of Artificial Sequence: Synthetic oligonucleotide
cuccaggcuuucccacuuc

SEQ ID NO: 164083 - RNA, 19 nt, Artificial Sequence
  Description of Artificial Sequence: Synthetic oligonucleotide
cccacccugccccucagag

SEQ ID NO: 164084 - RNA, 19 nt, Artificial Sequence
  Description of Artificial Sequence: Synthetic oligonucleotide
gacugaaauuacggguacc

SEQ ID NO: 164085 - RNA, 19 nt, Artificial Sequence
  Description of Artificial Sequence: Synthetic oligonucleotide
cugaagaugggagccuuua

SEQ ID NO: 164086 - RNA, 19 nt, Artificial Sequence
  Description of Artificial Sequence: Synthetic oligonucleotide
accuuuuaugcaaaagguu

SEQ ID NO: 164087 - RNA, 19 nt, Artificial Sequence
  Description of Artificial Sequence: Synthetic oligonucleotide
uuauuccggaaacuagugu

SEQ ID NO: 164088 - RNA, 19 nt, Artificial Sequence
  Description of Artificial Sequence: Synthetic oligonucleotide
uacauuucuauaaauagau

SEQ ID NO: 164089 - RNA, 19 nt, Artificial Sequence
  Description of Artificial Sequence: Synthetic oligonucleotide
ugcuguguauaugguauau

SEQ ID NO: 164090 - RNA, 19 nt, Artificial Sequence
  Description of Artificial Sequence: Synthetic oligonucleotide
uauacauauauauauauaa

SEQ ID NO: 164091 - RNA, 19 nt, Artificial Sequence
  Description of Artificial Sequence: Synthetic oligonucleotide
acauauauggaagaggaaa

SEQ ID NO: 164092 - RNA, 19 nt, Artificial Sequence
  Description of Artificial Sequence: Synthetic oligonucleotide
aaggcugguacaacggagg

SEQ ID NO: 164093 - RNA, 19 nt, Artificial Sequence
  Description of Artificial Sequence: Synthetic oligonucleotide
gccugcgacccugggggca

SEQ ID NO: 164094 - RNA, 19 nt, Artificial Sequence
  Description of Artificial Sequence: Synthetic oligonucleotide
acaggaggcaggcauggcc

SEQ ID NO: 164095 - RNA, 19 nt, Artificial Sequence
  Description of Artificial Sequence: Synthetic oligonucleotide
ccugggcggggcguggggg

SEQ ID NO: 164096 - RNA, 19 nt, Artificial Sequence
  Description of Artificial Sequence: Synthetic oligonucleotide
gggcguggagggaggcccc

SEQ ID NO: 164097 - RNA, 19 nt, Artificial Sequence
  Description of Artificial Sequence: Synthetic oligonucleotide
caggggucucacccaugca

SEQ ID NO: 164098 - RNA, 19 nt, Artificial Sequence
  Description of Artificial Sequence: Synthetic oligonucleotide
aagcagaggaccagggcuu

SEQ ID NO: 164099 - RNA, 19 nt, Artificial Sequence
  Description of Artificial Sequence: Synthetic oligonucleotide
uuuucuggcaccgcaguuu

SEQ ID NO: 164100 - RNA, 19 nt, Artificial Sequence
  Description of Artificial Sequence: Synthetic oligonucleotide
uuguuuuaaaacuggaccu

SEQ ID NO: 164101 - RNA, 19 nt, Artificial Sequence
  Description of Artificial Sequence: Synthetic oligonucleotide
uguauauuuguaaagcuau

SEQ ID NO: 164102 - RNA, 19 nt, Artificial Sequence
  Description of Artificial Sequence: Synthetic oligonucleotide
uuuaugggccccuggcacu

SEQ ID NO: 164103 - RNA, 19 nt, Artificial Sequence
  Description of Artificial Sequence: Synthetic oligonucleotide
ucuuguucccacaccccaa

SEQ ID NO: 164104 - RNA, 19 nt, Artificial Sequence
  Description of Artificial Sequence: Synthetic oligonucleotide
acacuuccagcauuuagcu

SEQ ID NO: 164105 - RNA, 19 nt, Artificial Sequence
  Description of Artificial Sequence: Synthetic oligonucleotide
uggccacauggcggagagu

SEQ ID NO: 164106 - RNA, 19 nt, Artificial Sequence
  Description of Artificial Sequence: Synthetic oligonucleotide
uuuuaauuuuuaacuuauu

SEQ ID NO: 164107 - RNA, 19 nt, Artificial Sequence
  Description of Artificial Sequence: Synthetic oligonucleotide
ugacaaccgagaagguuua

SEQ ID NO: 164108 - RNA, 19 nt, Artificial Sequence
  Description of Artificial Sequence: Synthetic oligonucleotide
aucccgccgauagagggac

SEQ ID NO: 164109 - RNA, 19 nt, Artificial Sequence
  Description of Artificial Sequence: Synthetic oligonucleotide
cggccaagaauguacgucc

SEQ ID NO: 164110 - RNA, 19 nt, Artificial Sequence
  Description of Artificial Sequence: Synthetic oligonucleotide
cagccugccccggagcugg

SEQ ID NO: 164111 - RNA, 19 nt, Artificial Sequence
  Description of Artificial Sequence: Synthetic oligonucleotide
gaggauccccuccaagccu

SEQ ID NO: 164112 - RNA, 19 nt, Artificial Sequence
  Description of Artificial Sequence: Synthetic oligonucleotide
uaaaagguuguuaauaguu

SEQ ID NO: 164113 - RNA, 19 nt, Artificial Sequence
  Description of Artificial Sequence: Synthetic oligonucleotide
uggaggugauuccagugaa

SEQ ID NO: 164114 - RNA, 19 nt, Artificial Sequence
  Description of Artificial Sequence: Synthetic oligonucleotide
agauauuuuauuugcuuug

SEQ ID NO: 164115 - RNA, 19 nt, Artificial Sequence
  Description of Artificial Sequence: Synthetic oligonucleotide
guccuuuuucaggagaauu

SEQ ID NO: 164116 - RNA, 19 nt, Artificial Sequence
  Description of Artificial Sequence: Synthetic oligonucleotide
uagauuucuauaggauuuu

SEQ ID NO: 164117 - RNA, 19 nt, Artificial Sequence
  Description of Artificial Sequence: Synthetic oligonucleotide
uucuuuaggagauuuauuu

SEQ ID NO: 164118 - RNA, 19 nt, Artificial Sequence
  Description of Artificial Sequence: Synthetic oligonucleotide
uuuuggacuucaaagcaag

SEQ ID NO: 164119 - RNA, 19 nt, Artificial Sequence
  Description of Artificial Sequence: Synthetic oligonucleotide
gcugguauuuucauacaaa

SEQ ID NO: 164120 - RNA, 19 nt, Artificial Sequence
  Description of Artificial Sequence: Synthetic oligonucleotide
auucuucuaauugcugugu

SEQ ID NO: 164121 - RNA, 19 nt, Artificial Sequence
  Description of Artificial Sequence: Synthetic oligonucleotide
ugucccaggcagggagacg

SEQ ID NO: 164122 - RNA, 19 nt, Artificial Sequence
  Description of Artificial Sequence: Synthetic oligonucleotide
gguuuccagggaggggccg

SEQ ID NO: 164123 - RNA, 19 nt, Artificial Sequence
  Description of Artificial Sequence: Synthetic oligonucleotide
ggcccugugugcagguucc

SEQ ID NO: 164124 - RNA, 19 nt, Artificial Sequence
  Description of Artificial Sequence: Synthetic oligonucleotide
cgauguuauuagauguuac

SEQ ID NO: 164125 - RNA, 19 nt, Artificial Sequence
  Description of Artificial Sequence: Synthetic oligonucleotide
caaguuuauauauaucuau

SEQ ID NO: 164126 - RNA, 19 nt, Artificial Sequence
  Description of Artificial Sequence: Synthetic oligonucleotide
uauauauaauuuauugagu

SEQ ID NO: 164127 - RNA, 19 nt, Artificial Sequence
  Description of Artificial Sequence: Synthetic oligonucleotide
uuuuuacaagauguauuug

SEQ ID NO: 164128 - RNA, 19 nt, Artificial Sequence
  Description of Artificial Sequence: Synthetic oligonucleotide
guuguagacuuaacacuuc

SEQ ID NO: 164129 - RNA, 19 nt, Artificial Sequence
  Description of Artificial Sequence: Synthetic oligonucleotide
cuuacgcaaugcuucuaga

SEQ ID NO: 164130 - RNA, 19 nt, Artificial Sequence
  Description of Artificial Sequence: Synthetic oligonucleotide
aguuuuauagccuggacug

SEQ ID NO: 164131 - RNA, 19 nt, Artificial Sequence
  Description of Artificial Sequence: Synthetic oligonucleotide
gcuaccuuucaaagcuugg

SEQ ID NO: 164132 - RNA, 19 nt, Artificial Sequence
  Description of Artificial Sequence: Synthetic oligonucleotide
gagggaagccgugaauuca

SEQ ID NO: 164133 - RNA, 19 nt, Artificial Sequence
  Description of Artificial Sequence: Synthetic oligonucleotide
aguugguucguucuguacu

SEQ ID NO: 164134 - RNA, 19 nt, Artificial Sequence
  Description of Artificial Sequence: Synthetic oligonucleotide
uguuacugggcccugaguc

SEQ ID NO: 164135 - RNA, 19 nt, Artificial Sequence
  Description of Artificial Sequence: Synthetic oligonucleotide
cugggcagcugucccuugc

SEQ ID NO: 164136 - RNA, 19 nt, Artificial Sequence
  Description of Artificial Sequence: Synthetic oligonucleotide
cuugccugcagggccaugg

SEQ ID NO: 164137 - RNA, 19 nt, Artificial Sequence
  Description of Artificial Sequence: Synthetic oligonucleotide
gcucaggguggucucuucu

SEQ ID NO: 164138 - RNA, 19 nt, Artificial Sequence
  Description of Artificial Sequence: Synthetic oligonucleotide
uuggggcccagugcauggu

SEQ ID NO: 164139 - RNA, 19 nt, Artificial Sequence
  Description of Artificial Sequence: Synthetic oligonucleotide
uggccagaggugucaccca

SEQ ID NO: 164140 - RNA, 19 nt, Artificial Sequence
  Description of Artificial Sequence: Synthetic oligonucleotide
aaaccggcaggugcgauuu

SEQ ID NO: 164141 - RNA, 19 nt, Artificial Sequence
  Description of Artificial Sequence: Synthetic oligonucleotide
uuguuaacccagcgacgaa

SEQ ID NO: 164142 - RNA, 19 nt, Artificial Sequence
  Description of Artificial Sequence: Synthetic oligonucleotide
acuuuccgaaaaauaaaga

SEQ ID NO: 164143 - RNA, 19 nt, Artificial Sequence
  Description of Artificial Sequence: Synthetic oligonucleotide
acaccugguugcuaaccug

SEQ ID NO: 164144 - RNA, 25 nt, Artificial Sequence
  Description of Artificial Sequence: Synthetic oligonucleotide
cgcgcgcugccugaggacgccgcgg

SEQ ID NO: 164145 - RNA, 25 nt, Artificial Sequence
  Description of Artificial Sequence: Synthetic oligonucleotide
gcccccgcccccgccaugggcgccc

SEQ ID NO: 164146 - RNA, 25 nt, Artificial Sequence
  Description of Artificial Sequence: Synthetic oligonucleotide
ccugccugcgcccucgcgcucugcg

SEQ ID NO: 164147 - RNA, 25 nt, Artificial Sequence
  Description of Artificial Sequence: Synthetic oligonucleotide
guggccguggccaucguggccggcg

SEQ ID NO: 164148 - RNA, 25 nt, Artificial Sequence
  Description of Artificial Sequence: Synthetic oligonucleotide
gccuccucggaguccuuggggacgg

SEQ ID NO: 164149 - RNA, 25 nt, Artificial Sequence
  Description of Artificial Sequence: Synthetic oligonucleotide
gagcagcgcgucguggggcgagcgg

SEQ ID NO: 164150 - RNA, 25 nt, Artificial Sequence
  Description of Artificial Sequence: Synthetic oligonucleotide
gcagaagucccgggcccagagcccg

SEQ ID NO: 164151 - RNA, 25 nt, Artificial Sequence
  Description of Artificial Sequence: Synthetic oligonucleotide
ggccagcaggagcaguuggucuucg

SEQ ID NO: 164152 - RNA, 25 nt, Artificial Sequence
  Description of Artificial Sequence: Synthetic oligonucleotide
ggcagcggggaugcuguggagcuga

SEQ ID NO: 164153 - RNA, 25 nt, Artificial Sequence
  Description of Artificial Sequence: Synthetic oligonucleotide
agcugucccccgcccgggggugguc

SEQ ID NO: 164154 - RNA, 25 nt, Artificial Sequence
  Description of Artificial Sequence: Synthetic oligonucleotide
cccauggggcccacugucuggguca

SEQ ID NO: 164155 - RNA, 25 nt, Artificial Sequence
  Description of Artificial Sequence: Synthetic oligonucleotide
aaggauggcacagggcuggugcccu

SEQ ID NO: 164156 - RNA, 25 nt, Artificial Sequence
  Description of Artificial Sequence: Synthetic oligonucleotide
ucggagcguguccugguggggcccc

SEQ ID NO: 164157 - RNA, 25 nt, Artificial Sequence
  Description of Artificial Sequence: Synthetic oligonucleotide
cagcggcugcaggugcugaaugccu

SEQ ID NO: 164158 - RNA, 25 nt, Artificial Sequence
  Description of Artificial Sequence: Synthetic oligonucleotide
ucccacgaggacuccggggccuaca

SEQ ID NO: 164159 - RNA, 25 nt, Artificial Sequence
  Description of Artificial Sequence: Synthetic oligonucleotide
agcugccggcagcggcucacgcagc

SEQ ID NO: 164160 - RNA, 25 nt, Artificial Sequence
  Description of Artificial Sequence: Synthetic oligonucleotide
cgcguacugugccacuucagugugc

SEQ ID NO: 164161 - RNA, 25 nt, Artificial Sequence
  Description of Artificial Sequence: Synthetic oligonucleotide
cgggugacagacgcuccauccucgg

SEQ ID NO: 164162 - RNA, 25 nt, Artificial Sequence
  Description of Artificial Sequence: Synthetic oligonucleotide
ggagaugacgaagacggggaggacg

SEQ ID NO: 164163 - RNA, 25 nt, Artificial Sequence
  Description of Artificial Sequence: Synthetic oligonucleotide
gaggcugaggacacagguguggaca

SEQ ID NO: 164164 - RNA, 25 nt, Artificial Sequence
  Description of Artificial Sequence: Synthetic oligonucleotide
acaggggccccuuacuggacacggc

SEQ ID NO: 164165 - RNA, 25 nt, Artificial Sequence
  Description of Artificial Sequence: Synthetic oligonucleotide
cccgagcggauggacaagaagcugc

SEQ ID NO: 164166 - RNA, 25 nt, Artificial Sequence
  Description of Artificial Sequence: Synthetic oligonucleotide
cuggccgugccggccgccaacaccg

SEQ ID NO: 164167 - RNA, 25 nt, Artificial Sequence
  Description of Artificial Sequence: Synthetic oligonucleotide
guccgcuuccgcugcccagccgcug

SEQ ID NO: 164168 - RNA, 25 nt, Artificial Sequence
  Description of Artificial Sequence: Synthetic oligonucleotide
ggcaaccccacucccuccaucuccu

SEQ ID NO: 164169 - RNA, 25 nt, Artificial Sequence
  Description of Artificial Sequence: Synthetic oligonucleotide
uggcugaagaacggcagggaguucc

SEQ ID NO: 164170 - RNA, 25 nt, Artificial Sequence
  Description of Artificial Sequence: Synthetic oligonucleotide
cgcggcgagcaccgcauuggaggca

SEQ ID NO: 164171 - RNA, 25 nt, Artificial Sequence
  Description of Artificial Sequence: Synthetic oligonucleotide
aucaagcugcggcaucagcagugga

SEQ ID NO: 164172 - RNA, 25 nt, Artificial Sequence
  Description of Artificial Sequence: Synthetic oligonucleotide
agccuggucauggaaagcguggugc

SEQ ID NO: 164173 - RNA, 25 nt, Artificial Sequence
  Description of Artificial Sequence: Synthetic oligonucleotide
cccucggaccgcggcaacuacaccu

SEQ ID NO: 164174 - RNA, 25 nt, Artificial Sequence
  Description of Artificial Sequence: Synthetic oligonucleotide
ugcgucguggagaacaaguuuggca

SEQ ID NO: 164175 - RNA, 25 nt, Artificial Sequence
  Description of Artificial Sequence: Synthetic oligonucleotide
agcauccggcagacguacacgcugg

SEQ ID NO: 164176 - RNA, 25 nt, Artificial Sequence
  Description of Artificial Sequence: Synthetic oligonucleotide
gacgugcuggagcgcuccccgcacc

SEQ ID NO: 164177 - RNA, 25 nt, Artificial Sequence
  Description of Artificial Sequence: Synthetic oligonucleotide
cggcccauccugcaggcggggcugc

SEQ ID NO: 164178 - RNA, 25 nt, Artificial Sequence
  Description of Artificial Sequence: Synthetic oligonucleotide
ccggccaaccagacggcggugcugg

SEQ ID NO: 164179 - RNA, 25 nt, Artificial Sequence
  Description of Artificial Sequence: Synthetic oligonucleotide
ggcagcgacguggaguuccacugca

SEQ ID NO: 164180 - RNA, 25 nt, Artificial Sequence
  Description of Artificial Sequence: Synthetic oligonucleotide
aagguguacagugacgcacagcccc

SEQ ID NO: 164181 - RNA, 25 nt, Artificial Sequence
  Description of Artificial Sequence: Synthetic oligonucleotide
cacauccaguggcucaagcacgugg

SEQ ID NO: 164182 - RNA, 25 nt, Artificial Sequence
  Description of Artificial Sequence: Synthetic oligonucleotide
gaggugaacggcagcaaggugggcc

SEQ ID NO: 164183 - RNA, 25 nt, Artificial Sequence
  Description of Artificial Sequence: Synthetic oligonucleotide
ccggacggcacacccuacguuaccg

SEQ ID NO: 164184 - RNA, 25 nt, Artificial Sequence
  Description of Artificial Sequence: Synthetic oligonucleotide
gugcucaagacggcgggcgcuaaca

SEQ ID NO: 164185 - RNA, 25 nt, Artificial Sequence
  Description of Artificial Sequence: Synthetic oligonucleotide
accaccgacaaggagcuagagguuc

SEQ ID NO: 164186 - RNA, 25 nt, Artificial Sequence
  Description of Artificial Sequence: Synthetic oligonucleotide
cucuccuugcacaacgucaccuuug

SEQ ID NO: 164187 - RNA, 25 nt, Artificial Sequence
  Description of Artificial Sequence: Synthetic oligonucleotide
gaggacgccggggaguacaccugcc

SEQ ID NO: 164188 - RNA, 25 nt, Artificial Sequence
  Description of Artificial Sequence: Synthetic oligonucleotide
cuggcgggcaauucuauuggguuuu

SEQ ID NO: 164189 - RNA, 25 nt, Artificial Sequence
  Description of Artificial Sequence: Synthetic oligonucleotide
ucucaucacucugcguggcuggugg

SEQ ID NO: 164190 - RNA, 25 nt, Artificial Sequence
  Description of Artificial Sequence: Synthetic oligonucleotide
gugcugccagccgaggaggagcugg

SEQ ID NO: 164191 - RNA, 25 nt, Artificial Sequence
  Description of Artificial Sequence: Synthetic oligonucleotide
guggaggcugacgaggcgggcagug

SEQ ID NO: 164192 - RNA, 25 nt, Artificial Sequence
  Description of Artificial Sequence: Synthetic oligonucleotide
guguaugcaggcauccucagcuacg

SEQ ID NO: 164193 - RNA, 25 nt, Artificial Sequence
  Description of Artificial Sequence: Synthetic oligonucleotide
ggggugggcuucuuccuguucaucc

SEQ ID NO: 164194 - RNA, 25 nt, Artificial Sequence
  Description of Artificial Sequence: Synthetic oligonucleotide
cuggugguggcggcugugacgcucu

SEQ ID NO: 164195 - RNA, 25 nt, Artificial Sequence
  Description of Artificial Sequence: Synthetic oligonucleotide
ugccgccugcgcagcccccccaaga

SEQ ID NO: 164196 - RNA, 25 nt, Artificial Sequence
  Description of Artificial Sequence: Synthetic oligonucleotide
aaaggccugggcucccccaccgugc

SEQ ID NO: 164197 - RNA, 25 nt, Artificial Sequence
  Description of Artificial Sequence: Synthetic oligonucleotide
cacaagaucucccgcuucccgcuca

SEQ ID NO: 164198 - RNA, 25 nt, Artificial Sequence
  Description of Artificial Sequence: Synthetic oligonucleotide
aagcgacaggugucccuggagucca

SEQ ID NO: 164199 - RNA, 25 nt, Artificial Sequence
  Description of Artificial Sequence: Synthetic oligonucleotide
aacgcguccaugagcuccaacacac

SEQ ID NO: 164200 - RNA, 25 nt, Artificial Sequence
  Description of Artificial Sequence: Synthetic oligonucleotide
ccacuggugcgcaucgcaaggcugu

SEQ ID NO: 164201 - RNA, 25 nt, Artificial Sequence
  Description of Artificial Sequence: Synthetic oligonucleotide
uccucaggggagggccccacgcugg

SEQ ID NO: 164202 - RNA, 25 nt, Artificial Sequence
  Description of Artificial Sequence: Synthetic oligonucleotide
gccaaugucuccgagcucgagcugc

SEQ ID NO: 164203 - RNA, 25 nt, Artificial Sequence
  Description of Artificial Sequence: Synthetic oligonucleotide
ccugccgaccccaaaugggagcugu

SEQ ID NO: 164204 - RNA, 25 nt, Artificial Sequence
  Description of Artificial Sequence: Synthetic oligonucleotide
ucucgggcccggcugacccugggca

SEQ ID NO: 164205 - RNA, 25 nt, Artificial Sequence
  Description of Artificial Sequence: Synthetic oligonucleotide
aagccccuuggggagggcugcuucg

SEQ ID NO: 164206 - RNA, 25 nt, Artificial Sequence
  Description of Artificial Sequence: Synthetic oligonucleotide
ggccagguggucauggcggaggcca

SEQ ID NO: 164207 - RNA, 25 nt, Artificial Sequence
  Description of Artificial Sequence: Synthetic oligonucleotide
aucggcauugacaaggaccgggccg

SEQ ID NO: 164208 - RNA, 25 nt, Artificial Sequence
  Description of Artificial Sequence: Synthetic oligonucleotide
gccaagccugucaccguagccguga

SEQ ID NO: 164209 - RNA, 25 nt, Artificial Sequence
  Description of Artificial Sequence: Synthetic oligonucleotide
aagaugcugaaagacgaugccacug

SEQ ID NO: 164210 - RNA, 25 nt, Artificial Sequence
  Description of Artificial Sequence: Synthetic oligonucleotide
gacaaggaccugucggaccuggugu

SEQ ID NO: 164211 - RNA, 25 nt, Artificial Sequence
  Description of Artificial Sequence: Synthetic oligonucleotide
ucugagauggagaugaugaagauga

SEQ ID NO: 164212 - RNA, 25 nt, Artificial Sequence
  Description of Artificial Sequence: Synthetic oligonucleotide
aucgggaaacacaaaaacaucauca

SEQ ID NO: 164213 - RNA, 25 nt, Artificial Sequence
  Description of Artificial Sequence: Synthetic oligonucleotide
aaccugcugggcgccugcacgcagg

SEQ ID NO: 164214 - RNA, 25 nt, Artificial Sequence
  Description of Artificial Sequence: Synthetic oligonucleotide
ggcgggccccuguacgugcuggugg

SEQ ID NO: 164215 - RNA, 25 nt, Artificial Sequence
  Description of Artificial Sequence: Synthetic oligonucleotide
gaguacgcggccaaggguaaccugc

SEQ ID NO: 164216 - RNA, 25 nt, Artificial Sequence
  Description of Artificial Sequence: Synthetic oligonucleotide
cgggaguuucugcgggcgcggcggc

SEQ ID NO: 164217 - RNA, 25 nt, Artificial Sequence
  Description of Artificial Sequence: Synthetic oligonucleotide
cccccgggccuggacuacuccuucg

SEQ ID NO: 164218 - RNA, 25 nt, Artificial Sequence
  Description of Artificial Sequence: Synthetic oligonucleotide
gacaccugcaagccgcccgaggagc

SEQ ID NO: 164219 - RNA, 25 nt, Artificial Sequence
  Description of Artificial Sequence: Synthetic oligonucleotide
cagcucaccuucaaggaccuggugu

SEQ ID NO: 164220 - RNA, 25 nt, Artificial Sequence
  Description of Artificial Sequence: Synthetic oligonucleotide
uccugugccuaccagguggcccggg

SEQ ID NO: 164221 - RNA, 25 nt, Artificial Sequence
  Description of Artificial Sequence: Synthetic oligonucleotide
ggcauggaguacuuggccucccaga

SEQ ID NO: 164222 - RNA, 25 nt, Artificial Sequence
  Description of Artificial Sequence: Synthetic oligonucleotide
aagugcauccacagggaccuggcug

SEQ ID NO: 164223 - RNA, 25 nt, Artificial Sequence
  Description of Artificial Sequence: Synthetic oligonucleotide
gcccgcaaugugcuggugaccgagg

SEQ ID NO: 164224 - RNA, 25 nt, Artificial Sequence
  Description of Artificial Sequence: Synthetic oligonucleotide
gacaacgugaugaagaucgcagacu

SEQ ID NO: 164225 - RNA, 25 nt, Artificial Sequence
  Description of Artificial Sequence: Synthetic oligonucleotide
uucgggcuggcccgggacgugcaca

SEQ ID NO: 164226 - RNA, 25 nt, Artificial Sequence
  Description of Artificial Sequence: Synthetic oligonucleotide
aaccucgacuacuacaagaagacaa

SEQ ID NO: 164227 - RNA, 25 nt, Artificial Sequence
  Description of Artificial Sequence: Synthetic oligonucleotide
accaacggccggcugcccgugaagu

SEQ ID NO: 164228 - RNA, 25 nt, Artificial Sequence
  Description of Artificial Sequence: Synthetic oligonucleotide
uggauggcgccugaggccuuguuug

SEQ ID NO: 164229 - RNA, 25 nt, Artificial Sequence
  Description of Artificial Sequence: Synthetic oligonucleotide
gaccgagucuacacucaccagagug

SEQ ID NO: 164230 - RNA, 25 nt, Artificial Sequence
  Description of Artificial Sequence: Synthetic oligonucleotide
gacgucugguccuuugggguccugc

SEQ ID NO: 164231 - RNA, 25 nt, Artificial Sequence
  Description of Artificial Sequence: Synthetic oligonucleotide
cucugggagaucuucacgcuggggg

SEQ ID NO: 164232 - RNA, 25 nt, Artificial Sequence
  Description of Artificial Sequence: Synthetic oligonucleotide
ggcuccccguaccccggcaucccug

SEQ ID NO: 164233 - RNA, 25 nt, Artificial Sequence
  Description of Artificial Sequence: Synthetic oligonucleotide
guggaggagcucuucaagcugcuga

SEQ ID NO: 164234 - RNA, 25 nt, Artificial Sequence
  Description of Artificial Sequence: Synthetic oligonucleotide
aaggagggccaccgcauggacaagc

SEQ ID NO: 164235 - RNA, 25 nt, Artificial Sequence
  Description of Artificial Sequence: Synthetic oligonucleotide
cccgccaacugcacacacgaccugu

SEQ ID NO: 164236 - RNA, 25 nt, Artificial Sequence
  Description of Artificial Sequence: Synthetic oligonucleotide
uacaugaucaugcgggagugcuggc

SEQ ID NO: 164237 - RNA, 25 nt, Artificial Sequence
  Description of Artificial Sequence: Synthetic oligonucleotide
caugccgcgcccucccagaggccca

SEQ ID NO: 164238 - RNA, 25 nt, Artificial Sequence
  Description of Artificial Sequence: Synthetic oligonucleotide
accuucaagcagcugguggaggacc

SEQ ID NO: 164239 - RNA, 25 nt, Artificial Sequence
  Description of Artificial Sequence: Synthetic oligonucleotide
cuggaccguguccuuaccgugacgu

SEQ ID NO: 164240 - RNA, 25 nt, Artificial Sequence
  Description of Artificial Sequence: Synthetic oligonucleotide
uccaccgacgaguaccuggaccugu

SEQ ID NO: 164241 - RNA, 25 nt, Artificial Sequence
  Description of Artificial Sequence: Synthetic oligonucleotide
ucggcgccuuucgagcaguacuccc

SEQ ID NO: 164242 - RNA, 25 nt, Artificial Sequence
  Description of Artificial Sequence: Synthetic oligonucleotide
ccggguggccaggacacccccagcu

SEQ ID NO: 164243 - RNA, 25 nt, Artificial Sequence
  Description of Artificial Sequence: Synthetic oligonucleotide
uccagcuccucaggggacgacuccg

SEQ ID NO: 164244 - RNA, 25 nt, Artificial Sequence
  Description of Artificial Sequence: Synthetic oligonucleotide
guguuugcccacgaccugcugcccc

SEQ ID NO: 164245 - RNA, 25 nt, Artificial Sequence
  Description of Artificial Sequence: Synthetic oligonucleotide
ccggccccacccagcagugggggcu

SEQ ID NO: 164246 - RNA, 25 nt, Artificial Sequence
  Description of Artificial Sequence: Synthetic oligonucleotide
ucgcggacgugaagggccacugguc

SEQ ID NO: 164247 - RNA, 25 nt, Artificial Sequence
  Description of Artificial Sequence: Synthetic oligonucleotide
ccccaacaaugugaggggucccuag

SEQ ID NO: 164248 - RNA, 25 nt, Artificial Sequence
  Description of Artificial Sequence: Synthetic oligonucleotide
gcagcccucccugcugcuggugcac

SEQ ID NO: 164249 - RNA, 25 nt, Artificial Sequence
  Description of Artificial Sequence: Synthetic oligonucleotide
cagccacuccccggcaugagacuca

SEQ ID NO: 164250 - RNA, 25 nt, Artificial Sequence
  Description of Artificial Sequence: Synthetic oligonucleotide
agugcagauggagagacagcuacac

SEQ ID NO: 164251 - RNA, 25 nt, Artificial Sequence
  Description of Artificial Sequence: Synthetic oligonucleotide
cagagcuuuggucugugugugugug

SEQ ID NO: 164252 - RNA, 25 nt, Artificial Sequence
  Description of Artificial Sequence: Synthetic oligonucleotide
gugugcgugugugugugugugugca

SEQ ID NO: 164253 - RNA, 25 nt, Artificial Sequence
  Description of Artificial Sequence: Synthetic oligonucleotide
acauccgcgugugccugugugcgug

SEQ ID NO: 164254 - RNA, 25 nt, Artificial Sequence
  Description of Artificial Sequence: Synthetic oligonucleotide
gcgcaucuugccuccaggugcagag

SEQ ID NO: 164255 - RNA, 25 nt, Artificial Sequence
  Description of Artificial Sequence: Synthetic oligonucleotide
gguacccuggguguccccgcugcug

SEQ ID NO: 164256 - RNA, 25 nt, Artificial Sequence
  Description of Artificial Sequence: Synthetic oligonucleotide
gugcaacggucuccugacuggugcu

SEQ ID NO: 164257 - RNA, 25 nt, Artificial Sequence
  Description of Artificial Sequence: Synthetic oligonucleotide
ugcagcaccgaggggccuuuguucu

SEQ ID NO: 164258 - RNA, 25 nt, Artificial Sequence
  Description of Artificial Sequence: Synthetic oligonucleotide
uggggggacccagugcagaauguaa

SEQ ID NO: 164259 - RNA, 25 nt, Artificial Sequence
  Description of Artificial Sequence: Synthetic oligonucleotide
agugggcccacccggugggaccccg

SEQ ID NO: 164260 - RNA, 25 nt, Artificial Sequence
  Description of Artificial Sequence: Synthetic oligonucleotide
guggggcagggagcugggcccgaca

SEQ ID NO: 164261 - RNA, 25 nt, Artificial Sequence
  Description of Artificial Sequence: Synthetic oligonucleotide
auggcucggccucugccuuugcacc

SEQ ID NO: 164262 - RNA, 25 nt, Artificial Sequence
  Description of Artificial Sequence: Synthetic oligonucleotide
cacgggacaucacagggugcgcucg

SEQ ID NO: 164263 - RNA, 25 nt, Artificial Sequence
  Description of Artificial Sequence: Synthetic oligonucleotide
ggccccucccacacccaaagcugag

SEQ ID NO: 164264 - RNA, 25 nt, Artificial Sequence
  Description of Artificial Sequence: Synthetic oligonucleotide
gccugcagggaagccccacaugucc

SEQ ID NO: 164265 - RNA, 25 nt, Artificial Sequence
  Description of Artificial Sequence: Synthetic oligonucleotide
cagcaccuugugccugggguguuag

SEQ ID NO: 164266 - RNA, 25 nt, Artificial Sequence
  Description of Artificial Sequence: Synthetic oligonucleotide
guggcaccgccuccccaccuccagg

SEQ ID NO: 164267 - RNA, 25 nt, Artificial Sequence
  Description of Artificial Sequence: Synthetic oligonucleotide
gcuuucccacuucccacccugcccc

SEQ ID NO: 164268 - RNA, 25 nt, Artificial Sequence
  Description of Artificial Sequence: Synthetic oligonucleotide
cucagagacugaaauuacggguacc

SEQ ID NO: 164269 - RNA, 25 nt, Artificial Sequence
  Description of Artificial Sequence: Synthetic oligonucleotide
cugaagaugggagccuuuaccuuuu

SEQ ID NO: 164270 - RNA, 25 nt, Artificial Sequence
  Description of Artificial Sequence: Synthetic oligonucleotide
uaugcaaaagguuuauuccggaaac

SEQ ID NO: 164271 - RNA, 25 nt, Artificial Sequence
  Description of Artificial Sequence: Synthetic oligonucleotide
cuaguguacauuucuauaaauagau

SEQ ID NO: 164272 - RNA, 25 nt, Artificial Sequence
  Description of Artificial Sequence: Synthetic oligonucleotide
ugcuguguauaugguauauauacau

SEQ ID NO: 164273 - RNA, 25 nt, Artificial Sequence
  Description of Artificial Sequence: Synthetic oligonucleotide
uauauauauauaacauauauggaag

SEQ ID NO: 164274 - RNA, 25 nt, Artificial Sequence
  Description of Artificial Sequence: Synthetic oligonucleotide
gaggaaaaggcugguacaacggagg

SEQ ID NO: 164275 - RNA, 25 nt, Artificial Sequence
  Description of Artificial Sequence: Synthetic oligonucleotide
gccugcgacccugggggcacaggag

SEQ ID NO: 164276 - RNA, 25 nt, Artificial Sequence
  Description of Artificial Sequence: Synthetic oligonucleotide
ggcaggcauggcccugggcggggcg

SEQ ID NO: 164277 - RNA, 25 nt, Artificial Sequence
  Description of Artificial Sequence: Synthetic oligonucleotide
gugggggggcguggagggaggcccc

SEQ ID NO: 164278 - RNA, 25 nt, Artificial Sequence
  Description of Artificial Sequence: Synthetic oligonucleotide
caggggucucacccaugcaagcaga

SEQ ID NO: 164279 - RNA, 25 nt, Artificial Sequence
  Description of Artificial Sequence: Synthetic oligonucleotide
aggaccagggcuuuuucuggcaccg

SEQ ID NO: 164280 - RNA, 25 nt, Artificial Sequence
  Description of Artificial Sequence: Synthetic oligonucleotide
gcaguuuuguuuuaaaacuggaccu

SEQ ID NO: 164281 - RNA, 25 nt, Artificial Sequence
  Description of Artificial Sequence: Synthetic oligonucleotide
uguauauuuguaaagcuauuuaugg

SEQ ID NO: 164282 - RNA, 25 nt, Artificial Sequence
  Description of Artificial Sequence: Synthetic oligonucleotide
ggccccuggcacucuuguucccaca

SEQ ID NO: 164283 - RNA, 25 nt, Artificial Sequence
  Description of Artificial Sequence: Synthetic oligonucleotide
accccaacacuuccagcauuuagcu

SEQ ID NO: 164284 - RNA, 25 nt, Artificial Sequence
  Description of Artificial Sequence: Synthetic oligonucleotide
uggccacauggcggagaguuuuaau

SEQ ID NO: 164285 - RNA, 25 nt, Artificial Sequence
  Description of Artificial Sequence: Synthetic oligonucleotide
uuuuuaacuuauugacaaccgagaa

SEQ ID NO: 164286 - RNA, 25 nt, Artificial Sequence
  Description of Artificial Sequence: Synthetic oligonucleotide
agguuuaucccgccgauagagggac

SEQ ID NO: 164287 - RNA, 25 nt, Artificial Sequence
  Description of Artificial Sequence: Synthetic oligonucleotide
cggccaagaauguacguccagccug

SEQ ID NO: 164288 - RNA, 25 nt, Artificial Sequence
  Description of Artificial Sequence: Synthetic oligonucleotide
gccccggagcuggaggauccccucc

SEQ ID NO: 164289 - RNA, 25 nt, Artificial Sequence
  Description of Artificial Sequence: Synthetic oligonucleotide
caagccuaaaagguuguuaauaguu

SEQ ID NO: 164290 - RNA, 25 nt, Artificial Sequence
  Description of Artificial Sequence: Synthetic oligonucleotide
uggaggugauuccagugaagauauu

SEQ ID NO: 164291 - RNA, 25 nt, Artificial Sequence
  Description of Artificial Sequence: Synthetic oligonucleotide
uuuauuugcuuuguccuuuuucagg

SEQ ID NO: 164292 - RNA, 25 nt, Artificial Sequence
  Description of Artificial Sequence: Synthetic oligonucleotide
gagaauuagauuucuauaggauuuu

SEQ ID NO: 164293 - RNA, 25 nt, Artificial Sequence
  Description of Artificial Sequence: Synthetic oligonucleotide
uucuuuaggagauuuauuuuuugga

SEQ ID NO: 164294 - RNA, 25 nt, Artificial Sequence
  Description of Artificial Sequence: Synthetic oligonucleotide
acuucaaagcaagcugguauuuuca

SEQ ID NO: 164295 - RNA, 25 nt, Artificial Sequence
  Description of Artificial Sequence: Synthetic oligonucleotide
auacaaauucuucuaauugcugugu

SEQ ID NO: 164296 - RNA, 25 nt, Artificial Sequence
  Description of Artificial Sequence: Synthetic oligonucleotide
ugucccaggcagggagacgguuucc

SEQ ID NO: 164297 - RNA, 25 nt, Artificial Sequence
  Description of Artificial Sequence: Synthetic oligonucleotide
cagggaggggccggcccugugugca

SEQ ID NO: 164298 - RNA, 25 nt, Artificial Sequence
  Description of Artificial Sequence: Synthetic oligonucleotide
agguuccgauguuauuagauguuac

SEQ ID NO: 164299 - RNA, 25 nt, Artificial Sequence
  Description of Artificial Sequence: Synthetic oligonucleotide
caaguuuauauauaucuauauauau

SEQ ID NO: 164300 - RNA, 25 nt, Artificial Sequence
  Description of Artificial Sequence: Synthetic oligonucleotide
uaauuuauugaguuuuuacaagaug

SEQ ID NO: 164301 - RNA, 25 nt, Artificial Sequence
  Description of Artificial Sequence: Synthetic oligonucleotide
guauuuguuguagacuuaacacuuc

SEQ ID NO: 164302 - RNA, 25 nt, Artificial Sequence
  Description of Artificial Sequence: Synthetic oligonucleotide
cuuacgcaaugcuucuagaguuuua

SEQ ID NO: 164303 - RNA, 25 nt, Artificial Sequence
  Description of Artificial Sequence: Synthetic oligonucleotide
auagccuggacugcuaccuuucaaa

SEQ ID NO: 164304 - RNA, 25 nt, Artificial Sequence
  Description of Artificial Sequence: Synthetic oligonucleotide
agcuuggagggaagccgugaauuca

SEQ ID NO: 164305 - RNA, 25 nt, Artificial Sequence
  Description of Artificial Sequence: Synthetic oligonucleotide
aguugguucguucuguacuguuacu

SEQ ID NO: 164306 - RNA, 25 nt, Artificial Sequence
  Description of Artificial Sequence: Synthetic oligonucleotide
ugggcccugagucugggcagcuguc

SEQ ID NO: 164307 - RNA, 25 nt, Artificial Sequence
  Description of Artificial Sequence: Synthetic oligonucleotide
cccuugcuugccugcagggccaugg

SEQ ID NO: 164308 - RNA, 25 nt, Artificial Sequence
  Description of Artificial Sequence: Synthetic oligonucleotide
gcucaggguggucucuucuuggggc

SEQ ID NO: 164309 - RNA, 25 nt, Artificial Sequence
  Description of Artificial Sequence: Synthetic oligonucleotide
cccagugcaugguggccagaggugu

SEQ ID NO: 164310 - RNA, 25 nt, Artificial Sequence
  Description of Artificial Sequence: Synthetic oligonucleotide
ucacccaaaccggcaggugcgauuu

SEQ ID NO: 164311 - RNA, 25 nt, Artificial Sequence
  Description of Artificial Sequence: Synthetic oligonucleotide
uuguuaacccagcgacgaacuuucc

SEQ ID NO: 164312 - RNA, 25 nt, Artificial Sequence
  Description of Artificial Sequence: Synthetic oligonucleotide
cgaaaaauaaagacaccugguugcu

SEQ ID NO: 164313 - RNA, 25 nt, Artificial Sequence
  Description of Artificial Sequence: Synthetic oligonucleotide
gugcucaaggugucccuggagucca

SEQ ID NO: 164314 - RNA, 2807 nt, Homo sapiens
gaaggcaguuggugggaaguccagcuugggucccugagagcugugagaaggagaugcggcugcugcuggcccuguuggggguccugcugagugugccugggccuccagucuugucccuggaggccucugaggaaguggagcuugagcccugccuggcucccagccuggagcagcaagagcaggagcugacaguagcccuugggcagccugugcgucugugcugugggcgggcugagcgugguggccacugguacaaggagggcagucgccuggcaccugcuggccguguacggggcuggaggggccgccuagagauugccagcuuccuaccugaggaugcuggccgcuaccucugccuggcacgaggcuccaugaucguccugcagaaucucaccuugauuacaggugacuccuugaccuccagcaacgaugaugaggaccccaagucccauagggaccccucgaauaggcacaguuacccccagcaagcacccuacuggacacacccccagcgcauggagaagaaacugcaugcaguaccugcggggaacaccgucaaguuccgcuguccagcugcaggcaaccccacgcccaccauccgcuggcuuaaggauggacaggccuuucauggggagaaccgcauuggaggcauucggcugcgccaucagcacuggagucucgugauggagagcguggugcccucggaccgcggcacauacaccugccugguagagaacgcugugggcagcauccgcuauaacuaccugcuagaugugcuggagcgguccccgcaccggcccauccugcaggccgggcucccggccaacaccacagccguggugggcagcgacguggagcugcugugcaagguguacagcgaugcccagccccacauccaguggcugaagcacaucgucaucaacggcagcagcuucggagccgacgguuuccccuaugugcaaguccuaaagacugcagacaucaauagcucagagguggagguccuguaccugcggaacgugucagccgaggacgcaggcgaguacaccugccucgcaggcaauuccaucggccucuccuaccagucugccuggcucacggugcugccagguacugggcgcaucccccaccucacaugugacagccugacuccagcaggcagaaccaagucucccacuuugcaguucucccuggagucaggcucuuccggcaagucaagcucaucccugguacgaggcgugcgucucuccuccagcggccccgccuugcucgccggccucgugagucuagaucuaccucucgacccacuaugggaguucccccgggacaggcuggugcuugggaagccccuaggcgagggcugcuuuggccagguaguacgugcagaggccuuuggcauggacccugcccggccugaccaagccagcacuguggccgucaagaugcucaaagacaacgccucugacaaggaccuggccgaccuggucucggagauggaggugaugaagcugaucggccgacacaagaacaucaucaaccugcuuggugucugcacccaggaagggccccuguacgugaucguggagugcgccgccaagggaaaccugcgggaguuccugcgggcccggcgccccccaggccccgaccucagccccgacgguccucggagcagugaggggccgcucuccuucccaguccuggucuccugcgccuaccagguggcccgaggcaugcaguaucuggagucccggaaguguauccaccgggaccuggcugcccgcaaugugcuggugacugaggacaaugugaugaagauugcugacuuugggcuggcccgcggcguccaccacauugacuacuauaagaaaaccagcaacggccgccugccugugaaguggauggcgcccgaggccuuguuugaccggguguacacacaccagagugacguguggucuuuugggauccugcuaugggagaucuucacccucgggggcuccccguauccuggcaucccgguggaggagcuguucucgcugcugcgggagggacaucggauggaccgacccccacacugccccccagagcuguacgggcugaugcgugagugcuggcacgcagcgcccucccagaggccuaccuucaagcagcugguggaggcgcuggacaagguccugcuggccgucucugaggaguaccucgaccuccgccugaccuucggacccuauucccccucugguggggacgccagcagcaccugcuccuccagcgauucugucuucagccacgacccccugccauugggauccagcuccuuccccuucgggucuggggugcagacaugagcaaggcucaaggcugugcaggcacauaggcugguggccuugggccuuggggcucagccacagccugacacagugcucgaccuugauagcauggggccccuggcccagaguugcugugccguguccaagggccgugcccuugcccuuggagcugccgugccuguguccugauggcccaaaugucaggguucugcucggcuucuuggaccuuggcgcuuaguccccaucccggguuuggcugagccuggcuggagagcugcuaugcuaaaccuccugccucccaauaccagcaggagguucugggccucugaacccccuuuccccacaccucccccugcugcugcugccccagcgucuugacgggagcauuggccccugagcccagagaagcuggaagccugccgaaaacaggagcaaauggcguuuuauaaauuauuuuuuugaaauaaaaaaaaaaaaaaaaaa

SEQ ID NO: 164315 - RNA, 3084 nt, Homo sapiens
cucgcucccggccgaggagcgcucgggcugucugcggacccugccgcgugcaggggucgcggccggcuggagcugggagugaggcggcggaggagccaggugaggaggagccaggugagcaggacccugugcugggcgcggagucacgcaggcucgaggaaggcaguuggugggaaguccagcuugggucccugagagcugugagaaggagaugcggcugcugcuggcccuguuggggguccugcugagugugccugggccuccagucuugucccuggaggccucugaggaaguggagcuugagcccugccuggcucccagccuggagcagcaagagcaggagcugacaguagcccuugggcagccugugcgucugugcugugggcgggcugagcgugguggccacugguacaaggagggcagucgccuggcaccugcuggccguguacggggcuggaggggccgccuagagauugccagcuuccuaccugaggaugcuggccgcuaccucugccuggcacgaggcuccaugaucguccugcagaaucucaccuugauuacaggugacuccuugaccuccagcaacgaugaugaggaccccaagucccauagggaccccucgaauaggcacaguuacccccagcaagcacccuacuggacacacccccagcgcauggagaagaaacugcaugcaguaccugcggggaacaccgucaaguuccgcuguccagcugcaggcaaccccacgcccaccauccgcuggcuuaaggauggacaggccuuucauggggagaaccgcauuggaggcauucggcugcgccaucagcacuggagucucgugauggagagcguggugcccucggaccgcggcacauacaccugccugguagagaacgcugugggcagcauccgcuauaacuaccugcuagaugugcuggagcgguccccgcaccggcccauccugcaggccgggcucccggccaacaccacagccguggugggcagcgacguggagcugcugugcaagguguacagcgaugcccagccccacauccaguggcugaagcacaucgucaucaacggcagcagcuucggagccgacgguuuccccuaugugcaaguccuaaagacugcagacaucaauagcucagagguggagguccuguaccugcggaacgugucagccgaggacgcaggcgaguacaccugccucgcaggcaauuccaucggccucuccuaccagucugccuggcucacggugcugccagaggaggaccccacauggaccgcagcagcgcccgaggccagguauacggacaucauccuguacgcgucgggcucccuggccuuggcugugcuccugcugcuggccgggcuguaucgagggcaggcgcuccacggccggcacccccgcccgcccgccacugugcagaagcucucccgcuucccucuggcccgacaguucucccuggagucaggcucuuccggcaagucaagcucaucccugguacgaggcgugcgucucuccuccagcggccccgccuugcucgccggccucgugagucuagaucuaccucucgacccacuaugggaguucccccgggacaggcuggugcuugggaagccccuaggcgagggcugcuuuggccagguaguacgugcagaggccuuuggcauggacccugcccggccugaccaagccagcacuguggccgucaagaugcucaaagacaacgccucugacaaggaccuggccgaccuggucucggagauggaggugaugaagcugaucggccgacacaagaacaucaucaaccugcuuggugucugcacccaggaagggccccuguacgugaucguggagugcgccgccaagggaaaccugcgggaguuccugcgggcccggcgccccccaggccccgaccucagccccgacgguccucggagcagugaggggccgcucuccuucccaguccuggucuccugcgccuaccagguggcccgaggcaugcaguaucuggagucccggaaguguauccaccgggaccuggcugcccgcaaugugcuggugacugaggacaaugugaugaagauugcugacuuugggcuggcccgcggcguccaccacauugacuacuauaagaaaaccagcaacggccgccugccugugaaguggauggcgcccgaggccuuguuugaccggguguacacacaccagagugacguguggucuuuugggauccugcuaugggagaucuucacccucgggggcuccccguauccuggcaucccgguggaggagcuguucucgcugcugcgggagggacaucggauggaccgacccccacacugccccccagagcuguacgggcugaugcgugagugcuggcacgcagcgcccucccagaggccuaccuucaagcagcugguggaggcgcuggacaagguccugcuggccgucucugaggaguaccucgaccuccgccugaccuucggacccuauucccccucugguggggacgccagcagcaccugcuccuccagcgauucugucuucagccacgacccccugccauugggauccagcuccuuccccuucgggucuggggugcagacaugagcaaggcucaaggcugugcaggcacauaggcugguggccuugggccuuggggcucagccacagccugacacagugcucgaccuugauagcauggggccccuggcccagaguugcugugccguguccaagggccgugcccuugcccuuggagcugccgugccuguguccugauggcccaaaugucaggguucugcucggcuucuuggaccuuggcgcuuaguccccaucccggguuuggcugagccuggcuggagagcugcuaugcuaaaccuccugccucccaauaccagcaggagguucugggccucugaacccccuuuccccacaccucccccugcugcugcugccccagcgucuugacgggagcauuggccccugagcccagagaagcuggaagccugccgaaaacaggagcaaauggcguuuuauaaauuauuuuuuugaaauaaaaaaaaaaaaaaaaa

SEQ ID NO: 164316 - RNA, 3040 nt, Homo sapiens
cucgcucccggccgaggagcgcucgggcugucugcggacccugccgcgugcaggggucgcggccggcuggagcugggagugaggcggcggaggagccaggugaggaggagccaggaaggcaguuggugggaaguccagcuugggucccugagagcugugagaaggagaugcggcugcugcuggcccuguuggggguccugcugagugugccugggccuccagucuugucccuggaggccucugaggaaguggagcuugagcccugccuggcucccagccuggagcagcaagagcaggagcugacaguagcccuugggcagccugugcgucugugcugugggcgggcugagcgugguggccacugguacaaggagggcagucgccuggcaccugcuggccguguacggggcuggaggggccgccuagagauugccagcuuccuaccugaggaugcuggccgcuaccucugccuggcacgaggcuccaugaucguccugcagaaucucaccuugauuacaggugacuccuugaccuccagcaacgaugaugaggaccccaagucccauagggaccccucgaauaggcacaguuacccccagcaagcacccuacuggacacacccccagcgcauggagaagaaacugcaugcaguaccugcggggaacaccgucaaguuccgcuguccagcugcaggcaaccccacgcccaccauccgcuggcuuaaggauggacaggccuuucauggggagaaccgcauuggaggcauucggcugcgccaucagcacuggagucucgugauggagagcguggugcccucggaccgcggcacauacaccugccugguagagaacgcugugggcagcauccgcuauaacuaccugcuagaugugcuggagcgguccccgcaccggcccauccugcaggccgggcucccggccaacaccacagccguggugggcagcgacguggagcugcugugcaagguguacagcgaugcccagccccacauccaguggcugaagcacaucgucaucaacggcagcagcuucggagccgacgguuuccccuaugugcaaguccuaaagacugcagacaucaauagcucagagguggagguccuguaccugcggaacgugucagccgaggacgcaggcgaguacaccugccucgcaggcaauuccaucggccucuccuaccagucugccuggcucacggugcugccagaggaggaccccacauggaccgcagcagcgcccgaggccagguauacggacaucauccuguacgcgucgggcucccuggccuuggcugugcuccugcugcuggccgggcuguaucgagggcaggcgcuccacggccggcacccccgcccgcccgccacugugcagaagcucucccgcuucccucuggcccgacaguucucccuggagucaggcucuuccggcaagucaagcucaucccugguacgaggcgugcgucucuccuccagcggccccgccuugcucgccggccucgugagucuagaucuaccucucgacccacuaugggaguucccccgggacaggcuggugcuugggaagccccuaggcgagggcugcuuuggccagguaguacgugcagaggccuuuggcauggacccugcccggccugaccaagccagcacuguggccgucaagaugcucaaagacaacgccucugacaaggaccuggccgaccuggucucggagauggaggugaugaagcugaucggccgacacaagaacaucaucaaccugcuuggugucugcacccaggaagggccccuguacgugaucguggagugcgccgccaagggaaaccugcgggaguuccugcgggcccggcgccccccaggccccgaccucagccccgacgguccucggagcagugaggggccgcucuccuucccaguccuggucuccugcgccuaccagguggcccgaggcaugcaguaucuggagucccggaaguguauccaccgggaccuggcugcccgcaaugugcuggugacugaggacaaugugaugaagauugcugacuuugggcuggcccgcggcguccaccacauugacuacuauaagaaaaccagcaacggccgccugccugugaaguggauggcgcccgaggccuuguuugaccggguguacacacaccagagugacguguggucuuuugggauccugcuaugggagaucuucacccucgggggcuccccguauccuggcaucccgguggaggagcuguucucgcugcugcgggagggacaucggauggaccgacccccacacugccccccagagcuguacgggcugaugcgugagugcuggcacgcagcgcccucccagaggccuaccuucaagcagcugguggaggcgcuggacaagguccugcuggccgucucugaggaguaccucgaccuccgccugaccuucggacccuauucccccucugguggggacgccagcagcaccugcuccuccagcgauucugucuucagccacgacccccugccauugggauccagcuccuuccccuucgggucuggggugcagacaugagcaaggcucaaggcugugcaggcacauaggcugguggccuugggccuuggggcucagccacagccugacacagugcucgaccuugauagcauggggccccuggcccagaguugcugugccguguccaagggccgugcccuugcccuuggagcugccgugccuguguccugauggcccaaaugucaggguucugcucggcuucuuggaccuuggcgcuuaguccccaucccggguuuggcugagccuggcuggagagcugcuaugcuaaaccuccugccucccaauaccagcaggagguucugggccucugaacccccuuuccccacaccucccccugcugcugcugccccagcgucuugacgggagcauuggccccugagcccagagaagcuggaagccugccgaaaacaggagcaaauggcguuuuauaaauuauuuuuuugaaauaaaaaaaaaaaaaaaaa

SEQ ID NO: 164317 - RNA, 19 nt, Artificial Sequence
  Description of Artificial Sequence: Synthetic oligonucleotide
cucgcucccggccgaggag

SEQ ID NO: 164318 - RNA, 19 nt, Artificial Sequence
  Description of Artificial Sequence: Synthetic oligonucleotide
gcgcucgggcugucugcgg

SEQ ID NO: 164319 - RNA, 19 nt, Artificial Sequence
  Description of Artificial Sequence: Synthetic oligonucleotide
gacccugccgcgugcaggg

SEQ ID NO: 164320 - RNA, 19 nt, Artificial Sequence
  Description of Artificial Sequence: Synthetic oligonucleotide
ggucgcggccggcuggagc

SEQ ID NO: 164321 - RNA, 19 nt, Artificial Sequence
  Description of Artificial Sequence: Synthetic oligonucleotide
cugggagugaggcggcgga

SEQ ID NO: 164322 - RNA, 19 nt, Artificial Sequence
  Description of Artificial Sequence: Synthetic oligonucleotide
aggagccaggugaggagga

SEQ ID NO: 164323 - RNA, 19 nt, Artificial Sequence
  Description of Artificial Sequence: Synthetic oligonucleotide
agccaggaaggcaguuggu

SEQ ID NO: 164324 - RNA, 19 nt, Artificial Sequence
  Description of Artificial Sequence: Synthetic oligonucleotide
ugggaaguccagcuugggu

SEQ ID NO: 164325 - RNA, 19 nt, Artificial Sequence
  Description of Artificial Sequence: Synthetic oligonucleotide
ucccugagagcugugagaa

SEQ ID NO: 164326 - RNA, 19 nt, Artificial Sequence
  Description of Artificial Sequence: Synthetic oligonucleotide
aggagaugcggcugcugcu

SEQ ID NO: 164327 - RNA, 19 nt, Artificial Sequence
  Description of Artificial Sequence: Synthetic oligonucleotide
uggcccuguuggggguccu

SEQ ID NO: 164328 - RNA, 19 nt, Artificial Sequence
  Description of Artificial Sequence: Synthetic oligonucleotide
ugcugagugugccugggcc

SEQ ID NO: 164329 - RNA, 19 nt, Artificial Sequence
  Description of Artificial Sequence: Synthetic oligonucleotide
cuccagucuugucccugga

SEQ ID NO: 164330 - RNA, 19 nt, Artificial Sequence
  Description of Artificial Sequence: Synthetic oligonucleotide
aggccucugaggaagugga

SEQ ID NO: 164331 - RNA, 19 nt, Artificial Sequence
  Description of Artificial Sequence: Synthetic oligonucleotide
agcuugagcccugccuggc

SEQ ID NO: 164332 - RNA, 19 nt, Artificial Sequence
  Description of Artificial Sequence: Synthetic oligonucleotide
cucccagccuggagcagca

SEQ ID NO: 164333 - RNA, 19 nt, Artificial Sequence
  Description of Artificial Sequence: Synthetic oligonucleotide
aagagcaggagcugacagu

SEQ ID NO: 164334 - RNA, 19 nt, Artificial Sequence
  Description of Artificial Sequence: Synthetic oligonucleotide
uagcccuugggcagccugu

SEQ ID NO: 164335 - RNA, 19 nt, Artificial Sequence
  Description of Artificial Sequence: Synthetic oligonucleotide
ugcgucugugcugugggcg

SEQ ID NO: 164336 - RNA, 19 nt, Artificial Sequence
  Description of Artificial Sequence: Synthetic oligonucleotide
gggcugagcgugguggcca

SEQ ID NO: 164337 - RNA, 19 nt, Artificial Sequence
  Description of Artificial Sequence: Synthetic oligonucleotide
acugguacaaggagggcag

SEQ ID NO: 164338 - RNA, 19 nt, Artificial Sequence
  Description of Artificial Sequence: Synthetic oligonucleotide
gucgccuggcaccugcugg

SEQ ID NO: 164339 - RNA, 19 nt, Artificial Sequence
  Description of Artificial Sequence: Synthetic oligonucleotide
gccguguacggggcuggag

SEQ ID NO: 164340 - RNA, 19 nt, Artificial Sequence
  Description of Artificial Sequence: Synthetic oligonucleotide
ggggccgccuagagauugc

SEQ ID NO: 164341 - RNA, 19 nt, Artificial Sequence
  Description of Artificial Sequence: Synthetic oligonucleotide
ccagcuuccuaccugagga

SEQ ID NO: 164342 - RNA, 19 nt, Artificial Sequence
  Description of Artificial Sequence: Synthetic oligonucleotide
augcuggccgcuaccucug

SEQ ID NO: 164343 - RNA, 19 nt, Artificial Sequence
  Description of Artificial Sequence: Synthetic oligonucleotide
gccuggcacgaggcuccau

SEQ ID NO: 164344 - RNA, 19 nt, Artificial Sequence
  Description of Artificial Sequence: Synthetic oligonucleotide
ugaucguccugcagaaucu

SEQ ID NO: 164345 - RNA, 19 nt, Artificial Sequence
  Description of Artificial Sequence: Synthetic oligonucleotide
ucaccuugauuacagguga

SEQ ID NO: 164346 - RNA, 19 nt, Artificial Sequence
  Description of Artificial Sequence: Synthetic oligonucleotide
acuccuugaccuccagcaa

SEQ ID NO: 164347 - RNA, 19 nt, Artificial Sequence
  Description of Artificial Sequence: Synthetic oligonucleotide
acgaugaugaggaccccaa

SEQ ID NO: 164348 - RNA, 19 nt, Artificial Sequence
  Description of Artificial Sequence: Synthetic oligonucleotide
agucccauagggaccccuc

SEQ ID NO: 164349 - RNA, 19 nt, Artificial Sequence
  Description of Artificial Sequence: Synthetic oligonucleotide
cgaauaggcacaguuaccc

SEQ ID NO: 164350 - RNA, 19 nt, Artificial Sequence
  Description of Artificial Sequence: Synthetic oligonucleotide
cccagcaagcacccuacug

SEQ ID NO: 164351 - RNA, 19 nt, Artificial Sequence
  Description of Artificial Sequence: Synthetic oligonucleotide
ggacacacccccagcgcau

SEQ ID NO: 164352 - RNA, 19 nt, Artificial Sequence
  Description of Artificial Sequence: Synthetic oligonucleotide
uggagaagaaacugcaugc

SEQ ID NO: 164353 - RNA, 19 nt, Artificial Sequence
  Description of Artificial Sequence: Synthetic oligonucleotide
caguaccugcggggaacac

SEQ ID NO: 164354 - RNA, 19 nt, Artificial Sequence
  Description of Artificial Sequence: Synthetic oligonucleotide
ccgucaaguuccgcugucc

SEQ ID NO: 164355 - RNA, 19 nt, Artificial Sequence
  Description of Artificial Sequence: Synthetic oligonucleotide
cagcugcaggcaaccccac

SEQ ID NO: 164356 - RNA, 19 nt, Artificial Sequence
  Description of Artificial Sequence: Synthetic oligonucleotide
cgcccaccauccgcuggcu

SEQ ID NO: 164357 - RNA, 19 nt, Artificial Sequence
  Description of Artificial Sequence: Synthetic oligonucleotide
uuaaggauggacaggccuu

SEQ ID NO: 164358 - RNA, 19 nt, Artificial Sequence
  Description of Artificial Sequence: Synthetic oligonucleotide
uucauggggagaaccgcau

SEQ ID NO: 164359 - RNA, 19 nt, Artificial Sequence
  Description of Artificial Sequence: Synthetic oligonucleotide
uuggaggcauucggcugcg

SEQ ID NO: 164360 - RNA, 19 nt, Artificial Sequence
  Description of Artificial Sequence: Synthetic oligonucleotide
gccaucagcacuggagucu

SEQ ID NO: 164361 - RNA, 19 nt, Artificial Sequence
  Description of Artificial Sequence: Synthetic oligonucleotide
ucgugauggagagcguggu

SEQ ID NO: 164362 - RNA, 19 nt, Artificial Sequence
  Description of Artificial Sequence: Synthetic oligonucleotide
ugcccucggaccgcggcac

SEQ ID NO: 164363 - RNA, 19 nt, Artificial Sequence
  Description of Artificial Sequence: Synthetic oligonucleotide
cauacaccugccugguaga

SEQ ID NO: 164364 - RNA, 19 nt, Artificial Sequence
  Description of Artificial Sequence: Synthetic oligonucleotide
agaacgcugugggcagcau

SEQ ID NO: 164365 - RNA, 19 nt, Artificial Sequence
  Description of Artificial Sequence: Synthetic oligonucleotide
uccgcuauaacuaccugcu

SEQ ID NO: 164366 - RNA, 19 nt, Artificial Sequence
  Description of Artificial Sequence: Synthetic oligonucleotide
uagaugugcuggagcgguc

SEQ ID NO: 164367 - RNA, 19 nt, Artificial Sequence
  Description of Artificial Sequence: Synthetic oligonucleotide
ccccgcaccggcccauccu

SEQ ID NO: 164368 - RNA, 19 nt, Artificial Sequence
  Description of Artificial Sequence: Synthetic oligonucleotide
ugcaggccgggcucccggc

SEQ ID NO: 164369 - RNA, 19 nt, Artificial Sequence
  Description of Artificial Sequence: Synthetic oligonucleotide
ccaacaccacagccguggu

SEQ ID NO: 164370 - RNA, 19 nt, Artificial Sequence
  Description of Artificial Sequence: Synthetic oligonucleotide
ugggcagcgacguggagcu

SEQ ID NO: 164371 - RNA, 19 nt, Artificial Sequence
  Description of Artificial Sequence: Synthetic oligonucleotide
ugcugugcaagguguacag

SEQ ID NO: 164372 - RNA, 19 nt, Artificial Sequence
  Description of Artificial Sequence: Synthetic oligonucleotide
gcgaugcccagccccacau

SEQ ID NO: 164373 - RNA, 19 nt, Artificial Sequence
  Description of Artificial Sequence: Synthetic oligonucleotide
uccaguggcugaagcacau

SEQ ID NO: 164374 - RNA, 19 nt, Artificial Sequence
  Description of Artificial Sequence: Synthetic oligonucleotide
ucgucaucaacggcagcag

SEQ ID NO: 164375 - RNA, 19 nt, Artificial Sequence
  Description of Artificial Sequence: Synthetic oligonucleotide
gcuucggagccgacgguuu

SEQ ID NO: 164376 - RNA, 19 nt, Artificial Sequence
  Description of Artificial Sequence: Synthetic oligonucleotide
uccccuaugugcaaguccu

SEQ ID NO: 164377 - RNA, 19 nt, Artificial Sequence
  Description of Artificial Sequence: Synthetic oligonucleotide
uaaagacugcagacaucaa

SEQ ID NO: 164378 - RNA, 19 nt, Artificial Sequence
  Description of Artificial Sequence: Synthetic oligonucleotide
auagcucagagguggaggu

SEQ ID NO: 164379 - RNA, 19 nt, Artificial Sequence
  Description of Artificial Sequence: Synthetic oligonucleotide
uccuguaccugcggaacgu

SEQ ID NO: 164380 - RNA, 19 nt, Artificial Sequence
  Description of Artificial Sequence: Synthetic oligonucleotide
ugucagccgaggacgcagg

SEQ ID NO: 164381 - RNA, 19 nt, Artificial Sequence
  Description of Artificial Sequence: Synthetic oligonucleotide
gcgaguacaccugccucgc

SEQ ID NO: 164382 - RNA, 19 nt, Artificial Sequence
  Description of Artificial Sequence: Synthetic oligonucleotide
caggcaauuccaucggccu

SEQ ID NO: 164383 - RNA, 19 nt, Artificial Sequence
  Description of Artificial Sequence: Synthetic oligonucleotide
ucuccuaccagucugccug

SEQ ID NO: 164384 - RNA, 19 nt, Artificial Sequence
  Description of Artificial Sequence: Synthetic oligonucleotide
ggcucacggugcugccaga

SEQ ID NO: 164385 - RNA, 19 nt, Artificial Sequence
  Description of Artificial Sequence: Synthetic oligonucleotide
aggaggaccccacauggac

SEQ ID NO: 164386 - RNA, 19 nt, Artificial Sequence
  Description of Artificial Sequence: Synthetic oligonucleotide
ccgcagcagcgcccgaggc

SEQ ID NO: 164387 - RNA, 19 nt, Artificial Sequence
  Description of Artificial Sequence: Synthetic oligonucleotide
ccagguauacggacaucau

SEQ ID NO: 164388 - RNA, 19 nt, Artificial Sequence
  Description of Artificial Sequence: Synthetic oligonucleotide
uccuguacgcgucgggcuc

SEQ ID NO: 164389 - RNA, 19 nt, Artificial Sequence
  Description of Artificial Sequence: Synthetic oligonucleotide
cccuggccuuggcugugcu

SEQ ID NO: 164390 - RNA, 19 nt, Artificial Sequence
  Description of Artificial Sequence: Synthetic oligonucleotide
uccugcugcuggccgggcu

SEQ ID NO: 164391 - RNA, 19 nt, Artificial Sequence
  Description of Artificial Sequence: Synthetic oligonucleotide
uguaucgagggcaggcgcu

SEQ ID NO: 164392 - RNA, 19 nt, Artificial Sequence
  Description of Artificial Sequence: Synthetic oligonucleotide
uccacggccggcacccccg

SEQ ID NO: 164393 - RNA, 19 nt, Artificial Sequence
  Description of Artificial Sequence: Synthetic oligonucleotide
gcccgcccgccacugugca

SEQ ID NO: 164394 - RNA, 19 nt, Artificial Sequence
  Description of Artificial Sequence: Synthetic oligonucleotide
agaagcucucccgcuuccc

SEQ ID NO: 164395 - RNA, 19 nt, Artificial Sequence
  Description of Artificial Sequence: Synthetic oligonucleotide
cucuggcccgacaguucuc

SEQ ID NO: 164396 - RNA, 19 nt, Artificial Sequence
  Description of Artificial Sequence: Synthetic oligonucleotide
cccuggagucaggcucuuc

SEQ ID NO: 164397 - RNA, 19 nt, Artificial Sequence
  Description of Artificial Sequence: Synthetic oligonucleotide
ccggcaagucaagcucauc

SEQ ID NO: 164398 - RNA, 19 nt, Artificial Sequence
  Description of Artificial Sequence: Synthetic oligonucleotide
cccugguacgaggcgugcg

SEQ ID NO: 164399 - RNA, 19 nt, Artificial Sequence
  Description of Artificial Sequence: Synthetic oligonucleotide
gucucuccuccagcggccc

SEQ ID NO: 164400 - RNA, 19 nt, Artificial Sequence
  Description of Artificial Sequence: Synthetic oligonucleotide
ccgccuugcucgccggccu

SEQ ID NO: 164401 - RNA, 19 nt, Artificial Sequence
  Description of Artificial Sequence: Synthetic oligonucleotide
ucgugagucuagaucuacc

SEQ ID NO: 164402 - RNA, 19 nt, Artificial Sequence
  Description of Artificial Sequence: Synthetic oligonucleotide
cucucgacccacuauggga

SEQ ID NO: 164403 - RNA, 19 nt, Artificial Sequence
  Description of Artificial Sequence: Synthetic oligonucleotide
aguucccccgggacaggcu

SEQ ID NO: 164404 - RNA, 19 nt, Artificial Sequence
  Description of Artificial Sequence: Synthetic oligonucleotide
uggugcuugggaagccccu

SEQ ID NO: 164405 - RNA, 19 nt, Artificial Sequence
  Description of Artificial Sequence: Synthetic oligonucleotide
uaggcgagggcugcuuugg

SEQ ID NO: 164406 - RNA, 19 nt, Artificial Sequence
  Description of Artificial Sequence: Synthetic oligonucleotide
gccagguaguacgugcaga

SEQ ID NO: 164407 - RNA, 19 nt, Artificial Sequence
  Description of Artificial Sequence: Synthetic oligonucleotide
aggccuuuggcauggaccc

SEQ ID NO: 164408 - RNA, 19 nt, Artificial Sequence
  Description of Artificial Sequence: Synthetic oligonucleotide
cugcccggccugaccaagc

SEQ ID NO: 164409 - RNA, 19 nt, Artificial Sequence
  Description of Artificial Sequence: Synthetic oligonucleotide
ccagcacuguggccgucaa

SEQ ID NO: 164410 - RNA, 19 nt, Artificial Sequence
  Description of Artificial Sequence: Synthetic oligonucleotide
agaugcucaaagacaacgc

SEQ ID NO: 164411 - RNA, 19 nt, Artificial Sequence
  Description of Artificial Sequence: Synthetic oligonucleotide
ccucugacaaggaccuggc

SEQ ID NO: 164412 - RNA, 19 nt, Artificial Sequence
  Description of Artificial Sequence: Synthetic oligonucleotide
ccgaccuggucucggagau

SEQ ID NO: 164413 - RNA, 19 nt, Artificial Sequence
  Description of Artificial Sequence: Synthetic oligonucleotide
uggaggugaugaagcugau

SEQ ID NO: 164414 - RNA, 19 nt, Artificial Sequence
  Description of Artificial Sequence: Synthetic oligonucleotide
ucggccgacacaagaacau

SEQ ID NO: 164415 - RNA, 19 nt, Artificial Sequence
  Description of Artificial Sequence: Synthetic oligonucleotide
ucaucaaccugcuuggugu

SEQ ID NO: 164416 - RNA, 19 nt, Artificial Sequence
  Description of Artificial Sequence: Synthetic oligonucleotide
ucugcacccaggaagggcc

SEQ ID NO: 164417 - RNA, 19 nt, Artificial Sequence
  Description of Artificial Sequence: Synthetic oligonucleotide
cccuguacgugaucgugga

SEQ ID NO: 164418 - RNA, 19 nt, Artificial Sequence
  Description of Artificial Sequence: Synthetic oligonucleotide
agugcgccgccaagggaaa

SEQ ID NO: 164419 - RNA, 19 nt, Artificial Sequence
  Description of Artificial Sequence: Synthetic oligonucleotide
accugcgggaguuccugcg

SEQ ID NO: 164420 - RNA, 19 nt, Artificial Sequence
  Description of Artificial Sequence: Synthetic oligonucleotide
gggcccggcgccccccagg

SEQ ID NO: 164421 - RNA, 19 nt, Artificial Sequence
  Description of Artificial Sequence: Synthetic oligonucleotide
gccccgaccucagccccga

SEQ ID NO: 164422 - RNA, 19 nt, Artificial Sequence
  Description of Artificial Sequence: Synthetic oligonucleotide
acgguccucggagcaguga

SEQ ID NO: 164423 - RNA, 19 nt, Artificial Sequence
  Description of Artificial Sequence: Synthetic oligonucleotide
aggggccgcucuccuuccc

SEQ ID NO: 164424 - RNA, 19 nt, Artificial Sequence
  Description of Artificial Sequence: Synthetic oligonucleotide
caguccuggucuccugcgc

SEQ ID NO: 164425 - RNA, 19 nt, Artificial Sequence
  Description of Artificial Sequence: Synthetic oligonucleotide
ccuaccagguggcccgagg

SEQ ID NO: 164426 - RNA, 19 nt, Artificial Sequence
  Description of Artificial Sequence: Synthetic oligonucleotide
gcaugcaguaucuggaguc

SEQ ID NO: 164427 - RNA, 19 nt, Artificial Sequence
  Description of Artificial Sequence: Synthetic oligonucleotide
cccggaaguguauccaccg

SEQ ID NO: 164428 - RNA, 19 nt, Artificial Sequence
  Description of Artificial Sequence: Synthetic oligonucleotide
gggaccuggcugcccgcaa

SEQ ID NO: 164429 - RNA, 19 nt, Artificial Sequence
  Description of Artificial Sequence: Synthetic oligonucleotide
augugcuggugacugagga

SEQ ID NO: 164430 - RNA, 19 nt, Artificial Sequence
  Description of Artificial Sequence: Synthetic oligonucleotide
acaaugugaugaagauugc

SEQ ID NO: 164431 - RNA, 19 nt, Artificial Sequence
  Description of Artificial Sequence: Synthetic oligonucleotide
cugacuuugggcuggcccg

SEQ ID NO: 164432 - RNA, 19 nt, Artificial Sequence
  Description of Artificial Sequence: Synthetic oligonucleotide
gcggcguccaccacauuga

SEQ ID NO: 164433 - RNA, 19 nt, Artificial Sequence
  Description of Artificial Sequence: Synthetic oligonucleotide
acuacuauaagaaaaccag

SEQ ID NO: 164434 - RNA, 19 nt, Artificial Sequence
  Description of Artificial Sequence: Synthetic oligonucleotide
gcaacggccgccugccugu

SEQ ID NO: 164435 - RNA, 19 nt, Artificial Sequence
  Description of Artificial Sequence: Synthetic oligonucleotide
ugaaguggauggcgcccga

SEQ ID NO: 164436 - RNA, 19 nt, Artificial Sequence
  Description of Artificial Sequence: Synthetic oligonucleotide
aggccuuguuugaccgggu

SEQ ID NO: 164437 - RNA, 19 nt, Artificial Sequence
  Description of Artificial Sequence: Synthetic oligonucleotide
uguacacacaccagaguga

SEQ ID NO: 164438 - RNA, 19 nt, Artificial Sequence
  Description of Artificial Sequence: Synthetic oligonucleotide
acguguggucuuuugggau

SEQ ID NO: 164439 - RNA, 19 nt, Artificial Sequence
  Description of Artificial Sequence: Synthetic oligonucleotide
uccugcuaugggagaucuu

SEQ ID NO: 164440 - RNA, 19 nt, Artificial Sequence
  Description of Artificial Sequence: Synthetic oligonucleotide
ucacccucgggggcucccc

SEQ ID NO: 164441 - RNA, 19 nt, Artificial Sequence
  Description of Artificial Sequence: Synthetic oligonucleotide
cguauccuggcaucccggu

SEQ ID NO: 164442 - RNA, 19 nt, Artificial Sequence
  Description of Artificial Sequence: Synthetic oligonucleotide
uggaggagcuguucucgcu

SEQ ID NO: 164443 - RNA, 19 nt, Artificial Sequence
  Description of Artificial Sequence: Synthetic oligonucleotide
ugcugcgggagggacaucg

SEQ ID NO: 164444 - RNA, 19 nt, Artificial Sequence
  Description of Artificial Sequence: Synthetic oligonucleotide
ggauggaccgacccccaca

SEQ ID NO: 164445 - RNA, 19 nt, Artificial Sequence
  Description of Artificial Sequence: Synthetic oligonucleotide
acugccccccagagcugua

SEQ ID NO: 164446 - RNA, 19 nt, Artificial Sequence
  Description of Artificial Sequence: Synthetic oligonucleotide
acgggcugaugcgugagug

SEQ ID NO: 164447 - RNA, 19 nt, Artificial Sequence
  Description of Artificial Sequence: Synthetic oligonucleotide
gcuggcacgcagcgcccuc

SEQ ID NO: 164448 - RNA, 19 nt, Artificial Sequence
  Description of Artificial Sequence: Synthetic oligonucleotide
cccagaggccuaccuucaa

SEQ ID NO: 164449 - RNA, 19 nt, Artificial Sequence
  Description of Artificial Sequence: Synthetic oligonucleotide
agcagcugguggaggcgcu

SEQ ID NO: 164450 - RNA, 19 nt, Artificial Sequence
  Description of Artificial Sequence: Synthetic oligonucleotide
uggacaagguccugcuggc

SEQ ID NO: 164451 - RNA, 19 nt, Artificial Sequence
  Description of Artificial Sequence: Synthetic oligonucleotide
ccgucucugaggaguaccu

SEQ ID NO: 164452 - RNA, 19 nt, Artificial Sequence
  Description of Artificial Sequence: Synthetic oligonucleotide
ucgaccuccgccugaccuu

SEQ ID NO: 164453 - RNA, 19 nt, Artificial Sequence
  Description of Artificial Sequence: Synthetic oligonucleotide
ucggacccuauucccccuc

SEQ ID NO: 164454 - RNA, 19 nt, Artificial Sequence
  Description of Artificial Sequence: Synthetic oligonucleotide
cugguggggacgccagcag

SEQ ID NO: 164455 - RNA, 19 nt, Artificial Sequence
  Description of Artificial Sequence: Synthetic oligonucleotide
gcaccugcuccuccagcga

SEQ ID NO: 164456 - RNA, 19 nt, Artificial Sequence
  Description of Artificial Sequence: Synthetic oligonucleotide
auucugucuucagccacga

SEQ ID NO: 164457 - RNA, 19 nt, Artificial Sequence
  Description of Artificial Sequence: Synthetic oligonucleotide
acccccugccauugggauc

SEQ ID NO: 164458 - RNA, 19 nt, Artificial Sequence
  Description of Artificial Sequence: Synthetic oligonucleotide
ccagcuccuuccccuucgg

SEQ ID NO: 164459 - RNA, 19 nt, Artificial Sequence
  Description of Artificial Sequence: Synthetic oligonucleotide
ggucuggggugcagacaug

SEQ ID NO: 164460 - RNA, 19 nt, Artificial Sequence
  Description of Artificial Sequence: Synthetic oligonucleotide
gagcaaggcucaaggcugu

SEQ ID NO: 164461 - RNA, 19 nt, Artificial Sequence
  Description of Artificial Sequence: Synthetic oligonucleotide
ugcaggcacauaggcuggu

SEQ ID NO: 164462 - RNA, 19 nt, Artificial Sequence
  Description of Artificial Sequence: Synthetic oligonucleotide
uggccuugggccuuggggc

SEQ ID NO: 164463 - RNA, 19 nt, Artificial Sequence
  Description of Artificial Sequence: Synthetic oligonucleotide
cucagccacagccugacac

SEQ ID NO: 164464 - RNA, 19 nt, Artificial Sequence
  Description of Artificial Sequence: Synthetic oligonucleotide
cagugcucgaccuugauag

SEQ ID NO: 164465 - RNA, 19 nt, Artificial Sequence
  Description of Artificial Sequence: Synthetic oligonucleotide
gcauggggccccuggccca

SEQ ID NO: 164466 - RNA, 19 nt, Artificial Sequence
  Description of Artificial Sequence: Synthetic oligonucleotide
agaguugcugugccguguc

SEQ ID NO: 164467 - RNA, 19 nt, Artificial Sequence
  Description of Artificial Sequence: Synthetic oligonucleotide
ccaagggccgugcccuugc

SEQ ID NO: 164468 - RNA, 19 nt, Artificial Sequence
  Description of Artificial Sequence: Synthetic oligonucleotide
cccuuggagcugccgugcc

SEQ ID NO: 164469 - RNA, 19 nt, Artificial Sequence
  Description of Artificial Sequence: Synthetic oligonucleotide
cuguguccugauggcccaa

SEQ ID NO: 164470 - RNA, 19 nt, Artificial Sequence
  Description of Artificial Sequence: Synthetic oligonucleotide
aaugucaggguucugcucg

SEQ ID NO: 164471 - RNA, 19 nt, Artificial Sequence
  Description of Artificial Sequence: Synthetic oligonucleotide
ggcuucuuggaccuuggcg

SEQ ID NO: 164472 - RNA, 19 nt, Artificial Sequence
  Description of Artificial Sequence: Synthetic oligonucleotide
gcuuaguccccaucccggg

SEQ ID NO: 164473 - RNA, 19 nt, Artificial Sequence
  Description of Artificial Sequence: Synthetic oligonucleotide
guuuggcugagccuggcug

SEQ ID NO: 164474 - RNA, 19 nt, Artificial Sequence
  Description of Artificial Sequence: Synthetic oligonucleotide
ggagagcugcuaugcuaaa

SEQ ID NO: 164475 - RNA, 19 nt, Artificial Sequence
  Description of Artificial Sequence: Synthetic oligonucleotide
accuccugccucccaauac

SEQ ID NO: 164476 - RNA, 19 nt, Artificial Sequence
  Description of Artificial Sequence: Synthetic oligonucleotide
ccagcaggagguucugggc

SEQ ID NO: 164477 - RNA, 19 nt, Artificial Sequence
  Description of Artificial Sequence: Synthetic oligonucleotide
ccucugaacccccuuuccc

SEQ ID NO: 164478 - RNA, 19 nt, Artificial Sequence
  Description of Artificial Sequence: Synthetic oligonucleotide
ccacaccucccccugcugc

SEQ ID NO: 164479 - RNA, 19 nt, Artificial Sequence
  Description of Artificial Sequence: Synthetic oligonucleotide
cugcugccccagcgucuug

SEQ ID NO: 164480 - RNA, 19 nt, Artificial Sequence
  Description of Artificial Sequence: Synthetic oligonucleotide
gacgggagcauuggccccu

SEQ ID NO: 164481 - RNA, 19 nt, Artificial Sequence
  Description of Artificial Sequence: Synthetic oligonucleotide
ugagcccagagaagcugga

SEQ ID NO: 164482 - RNA, 19 nt, Artificial Sequence
  Description of Artificial Sequence: Synthetic oligonucleotide
aagccugccgaaaacagga

SEQ ID NO: 164483 - RNA, 19 nt, Artificial Sequence
  Description of Artificial Sequence: Synthetic oligonucleotide
agcaaauggcguuuuauaa

SEQ ID NO: 164484 - RNA, 19 nt, Artificial Sequence
  Description of Artificial Sequence: Synthetic oligonucleotide
aauuauuuuuuugaaauaa

SEQ ID NO: 164485 - RNA, 19 nt, Artificial Sequence
  Description of Artificial Sequence: Synthetic oligonucleotide
agccaggugagcaggaccc

SEQ ID NO: 164486 - RNA, 19 nt, Artificial Sequence
  Description of Artificial Sequence: Synthetic oligonucleotide
cugugcugggcgcggaguc

SEQ ID NO: 164487 - RNA, 19 nt, Artificial Sequence
  Description of Artificial Sequence: Synthetic oligonucleotide
cacgcaggcucgaggaagg

SEQ ID NO: 164488 - RNA, 19 nt, Artificial Sequence
  Description of Artificial Sequence: Synthetic oligonucleotide
gcaguuggugggaagucca

SEQ ID NO: 164489 - RNA, 19 nt, Artificial Sequence
  Description of Artificial Sequence: Synthetic oligonucleotide
agcuugggucccugagagc

SEQ ID NO: 164490 - RNA, 19 nt, Artificial Sequence
  Description of Artificial Sequence: Synthetic oligonucleotide
cugugagaaggagaugcgg

SEQ ID NO: 164491 - RNA, 19 nt, Artificial Sequence
  Description of Artificial Sequence: Synthetic oligonucleotide
gcugcugcuggcccuguug

SEQ ID NO: 164492 - RNA, 19 nt, Artificial Sequence
  Description of Artificial Sequence: Synthetic oligonucleotide
ggggguccugcugagugug

SEQ ID NO: 164493 - RNA, 19 nt, Artificial Sequence
  Description of Artificial Sequence: Synthetic oligonucleotide
gccugggccuccagucuug

SEQ ID NO: 164494 - RNA, 19 nt, Artificial Sequence
  Description of Artificial Sequence: Synthetic oligonucleotide
gucccuggaggccucugag

SEQ ID NO: 164495 - RNA, 19 nt, Artificial Sequence
  Description of Artificial Sequence: Synthetic oligonucleotide
ggaaguggagcuugagccc

SEQ ID NO: 164496 - RNA, 19 nt, Artificial Sequence
  Description of Artificial Sequence: Synthetic oligonucleotide
cugccuggcucccagccug

SEQ ID NO: 164497 - RNA, 19 nt, Artificial Sequence
  Description of Artificial Sequence: Synthetic oligonucleotide
ggagcagcaagagcaggag

SEQ ID NO: 164498 - RNA, 19 nt, Artificial Sequence
  Description of Artificial Sequence: Synthetic oligonucleotide
gcugacaguagcccuuggg

SEQ ID NO: 164499 - RNA, 19 nt, Artificial Sequence
  Description of Artificial Sequence: Synthetic oligonucleotide
gcagccugugcgucugugc

SEQ ID NO: 164500 - RNA, 19 nt, Artificial Sequence
  Description of Artificial Sequence: Synthetic oligonucleotide
cugugggcgggcugagcgu

SEQ ID NO: 164501 - RNA, 19 nt, Artificial Sequence
  Description of Artificial Sequence: Synthetic oligonucleotide
ugguggccacugguacaag

SEQ ID NO: 164502 - RNA, 19 nt, Artificial Sequence
  Description of Artificial Sequence: Synthetic oligonucleotide
ggagggcagucgccuggca

SEQ ID NO: 164503 - RNA, 19 nt, Artificial Sequence
  Description of Artificial Sequence: Synthetic oligonucleotide
accugcuggccguguacgg

SEQ ID NO: 164504 - RNA, 19 nt, Artificial Sequence
  Description of Artificial Sequence: Synthetic oligonucleotide
gggcuggaggggccgccua

SEQ ID NO: 164505 - RNA, 19 nt, Artificial Sequence
  Description of Artificial Sequence: Synthetic oligonucleotide
agagauugccagcuuccua

SEQ ID NO: 164506 - RNA, 19 nt, Artificial Sequence
  Description of Artificial Sequence: Synthetic oligonucleotide
accugaggaugcuggccgc

SEQ ID NO: 164507 - RNA, 19 nt, Artificial Sequence
  Description of Artificial Sequence: Synthetic oligonucleotide
cuaccucugccuggcacga

SEQ ID NO: 164508 - RNA, 19 nt, Artificial Sequence
  Description of Artificial Sequence: Synthetic oligonucleotide
aggcuccaugaucguccug

SEQ ID NO: 164509 - RNA, 19 nt, Artificial Sequence
  Description of Artificial Sequence: Synthetic oligonucleotide
gcagaaucucaccuugauu

SEQ ID NO: 164510 - RNA, 19 nt, Artificial Sequence
  Description of Artificial Sequence: Synthetic oligonucleotide
uacaggugacuccuugacc

SEQ ID NO: 164511 - RNA, 19 nt, Artificial Sequence
  Description of Artificial Sequence: Synthetic oligonucleotide
cuccagcaacgaugaugag

SEQ ID NO: 164512 - RNA, 19 nt, Artificial Sequence
  Description of Artificial Sequence: Synthetic oligonucleotide
ggaccccaagucccauagg

SEQ ID NO: 164513 - RNA, 19 nt, Artificial Sequence
  Description of Artificial Sequence: Synthetic oligonucleotide
ggaccccucgaauaggcac

SEQ ID NO: 164514 - RNA, 19 nt, Artificial Sequence
  Description of Artificial Sequence: Synthetic oligonucleotide
caguuacccccagcaagca

SEQ ID NO: 164515 - RNA, 19 nt, Artificial Sequence
  Description of Artificial Sequence: Synthetic oligonucleotide
acccuacuggacacacccc

SEQ ID NO: 164516 - RNA, 19 nt, Artificial Sequence
  Description of Artificial Sequence: Synthetic oligonucleotide
ccagcgcauggagaagaaa

SEQ ID NO: 164517 - RNA, 19 nt, Artificial Sequence
  Description of Artificial Sequence: Synthetic oligonucleotide
acugcaugcaguaccugcg

SEQ ID NO: 164518 - RNA, 19 nt, Artificial Sequence
  Description of Artificial Sequence: Synthetic oligonucleotide
ggggaacaccgucaaguuc

SEQ ID NO: 164519 - RNA, 19 nt, Artificial Sequence
  Description of Artificial Sequence: Synthetic oligonucleotide
ccgcuguccagcugcaggc

SEQ ID NO: 164520 - RNA, 19 nt, Artificial Sequence
  Description of Artificial Sequence: Synthetic oligonucleotide
caaccccacgcccaccauc

SEQ ID NO: 164521 - RNA, 19 nt, Artificial Sequence
  Description of Artificial Sequence: Synthetic oligonucleotide
ccgcuggcuuaaggaugga

SEQ ID NO: 164522 - RNA, 19 nt, Artificial Sequence
  Description of Artificial Sequence: Synthetic oligonucleotide
acaggccuuucauggggag

SEQ ID NO: 164523 - RNA, 19 nt, Artificial Sequence
  Description of Artificial Sequence: Synthetic oligonucleotide
gaaccgcauuggaggcauu

SEQ ID NO: 164524 - RNA, 19 nt, Artificial Sequence
  Description of Artificial Sequence: Synthetic oligonucleotide
ucggcugcgccaucagcac

SEQ ID NO: 164525 - RNA, 19 nt, Artificial Sequence
  Description of Artificial Sequence: Synthetic oligonucleotide
cuggagucucgugauggag

SEQ ID NO: 164526 - RNA, 19 nt, Artificial Sequence
  Description of Artificial Sequence: Synthetic oligonucleotide
gagcguggugcccucggac

SEQ ID NO: 164527 - RNA, 19 nt, Artificial Sequence
  Description of Artificial Sequence: Synthetic oligonucleotide
ccgcggcacauacaccugc

SEQ ID NO: 164528 - RNA, 19 nt, Artificial Sequence
  Description of Artificial Sequence: Synthetic oligonucleotide
ccugguagagaacgcugug

SEQ ID NO: 164529 - RNA, 19 nt, Artificial Sequence
  Description of Artificial Sequence: Synthetic oligonucleotide
gggcagcauccgcuauaac

SEQ ID NO: 164530 - RNA, 19 nt, Artificial Sequence
  Description of Artificial Sequence: Synthetic oligonucleotide
cuaccugcuagaugugcug

SEQ ID NO: 164531 - RNA, 19 nt, Artificial Sequence
  Description of Artificial Sequence: Synthetic oligonucleotide
ggagcgguccccgcaccgg

SEQ ID NO: 164532 - RNA, 19 nt, Artificial Sequence
  Description of Artificial Sequence: Synthetic oligonucleotide
gcccauccugcaggccggg

SEQ ID NO: 164533 - RNA, 19 nt, Artificial Sequence
  Description of Artificial Sequence: Synthetic oligonucleotide
gcucccggccaacaccaca

SEQ ID NO: 164534 - RNA, 19 nt, Artificial Sequence
  Description of Artificial Sequence: Synthetic oligonucleotide
agccguggugggcagcgac

SEQ ID NO: 164535 - RNA, 19 nt, Artificial Sequence
  Description of Artificial Sequence: Synthetic oligonucleotide
cguggagcugcugugcaag

SEQ ID NO: 164536 - RNA, 19 nt, Artificial Sequence
  Description of Artificial Sequence: Synthetic oligonucleotide
gguguacagcgaugcccag

SEQ ID NO: 164537 - RNA, 19 nt, Artificial Sequence
  Description of Artificial Sequence: Synthetic oligonucleotide
gccccacauccaguggcug

SEQ ID NO: 164538 - RNA, 19 nt, Artificial Sequence
  Description of Artificial Sequence: Synthetic oligonucleotide
gaagcacaucgucaucaac

SEQ ID NO: 164539 - RNA, 19 nt, Artificial Sequence
  Description of Artificial Sequence: Synthetic oligonucleotide
cggcagcagcuucggagcc

SEQ ID NO: 164540 - RNA, 19 nt, Artificial Sequence
  Description of Artificial Sequence: Synthetic oligonucleotide
cgacgguuuccccuaugug

SEQ ID NO: 164541 - RNA, 19 nt, Artificial Sequence
  Description of Artificial Sequence: Synthetic oligonucleotide
gcaaguccuaaagacugca

SEQ ID NO: 164542 - RNA, 19 nt, Artificial Sequence
  Description of Artificial Sequence: Synthetic oligonucleotide
agacaucaauagcucagag

SEQ ID NO: 164543 - RNA, 19 nt, Artificial Sequence
  Description of Artificial Sequence: Synthetic oligonucleotide
gguggagguccuguaccug

SEQ ID NO: 164544 - RNA, 19 nt, Artificial Sequence
  Description of Artificial Sequence: Synthetic oligonucleotide
gcggaacgugucagccgag

SEQ ID NO: 164545 - RNA, 19 nt, Artificial Sequence
  Description of Artificial Sequence: Synthetic oligonucleotide
ggacgcaggcgaguacacc

SEQ ID NO: 164546 - RNA, 19 nt, Artificial Sequence
  Description of Artificial Sequence: Synthetic oligonucleotide
cugccucgcaggcaauucc

SEQ ID NO: 164547 - RNA, 19 nt, Artificial Sequence
  Description of Artificial Sequence: Synthetic oligonucleotide
caucggccucuccuaccag

SEQ ID NO: 164548 - RNA, 19 nt, Artificial Sequence
  Description of Artificial Sequence: Synthetic oligonucleotide
gucugccuggcucacggug

SEQ ID NO: 164549 - RNA, 19 nt, Artificial Sequence
  Description of Artificial Sequence: Synthetic oligonucleotide
gcugccagaggaggacccc

SEQ ID NO: 164550 - RNA, 19 nt, Artificial Sequence
  Description of Artificial Sequence: Synthetic oligonucleotide
cacauggaccgcagcagcg

SEQ ID NO: 164551 - RNA, 19 nt, Artificial Sequence
  Description of Artificial Sequence: Synthetic oligonucleotide
gcccgaggccagguauacg

SEQ ID NO: 164552 - RNA, 19 nt, Artificial Sequence
  Description of Artificial Sequence: Synthetic oligonucleotide
ggacaucauccuguacgcg

SEQ ID NO: 164553 - RNA, 19 nt, Artificial Sequence
  Description of Artificial Sequence: Synthetic oligonucleotide
gucgggcucccuggccuug

SEQ ID NO: 164554 - RNA, 19 nt, Artificial Sequence
  Description of Artificial Sequence: Synthetic oligonucleotide
ggcugugcuccugcugcug

SEQ ID NO: 164555 - RNA, 19 nt, Artificial Sequence
  Description of Artificial Sequence: Synthetic oligonucleotide
ggccgggcuguaucgaggg

SEQ ID NO: 164556 - RNA, 19 nt, Artificial Sequence
  Description of Artificial Sequence: Synthetic oligonucleotide
gcaggcgcuccacggccgg

SEQ ID NO: 164557 - RNA, 19 nt, Artificial Sequence
  Description of Artificial Sequence: Synthetic oligonucleotide
gcacccccgcccgcccgcc

SEQ ID NO: 164558 - RNA, 19 nt, Artificial Sequence
  Description of Artificial Sequence: Synthetic oligonucleotide
cacugugcagaagcucucc

SEQ ID NO: 164559 - RNA, 19 nt, Artificial Sequence
  Description of Artificial Sequence: Synthetic oligonucleotide
ccgcuucccucuggcccga

SEQ ID NO: 164560 - RNA, 19 nt, Artificial Sequence
  Description of Artificial Sequence: Synthetic oligonucleotide
acaguucucccuggaguca

SEQ ID NO: 164561 - RNA, 19 nt, Artificial Sequence
  Description of Artificial Sequence: Synthetic oligonucleotide
aggcucuuccggcaaguca

SEQ ID NO: 164562 - RNA, 19 nt, Artificial Sequence
  Description of Artificial Sequence: Synthetic oligonucleotide
aagcucaucccugguacga

SEQ ID NO: 164563 - RNA, 19 nt, Artificial Sequence
  Description of Artificial Sequence: Synthetic oligonucleotide
aggcgugcgucucuccucc

SEQ ID NO: 164564 - RNA, 19 nt, Artificial Sequence
  Description of Artificial Sequence: Synthetic oligonucleotide
cagcggccccgccuugcuc

SEQ ID NO: 164565 - RNA, 19 nt, Artificial Sequence
  Description of Artificial Sequence: Synthetic oligonucleotide
cgccggccucgugagucua

SEQ ID NO: 164566 - RNA, 19 nt, Artificial Sequence
  Description of Artificial Sequence: Synthetic oligonucleotide
agaucuaccucucgaccca

SEQ ID NO: 164567 - RNA, 19 nt, Artificial Sequence
  Description of Artificial Sequence: Synthetic oligonucleotide
acuaugggaguucccccgg

SEQ ID NO: 164568 - RNA, 19 nt, Artificial Sequence
  Description of Artificial Sequence: Synthetic oligonucleotide
ggacaggcuggugcuuggg

SEQ ID NO: 164569 - RNA, 19 nt, Artificial Sequence
  Description of Artificial Sequence: Synthetic oligonucleotide
gaagccccuaggcgagggc

SEQ ID NO: 164570 - RNA, 19 nt, Artificial Sequence
  Description of Artificial Sequence: Synthetic oligonucleotide
cugcuuuggccagguagua

SEQ ID NO: 164571 - RNA, 19 nt, Artificial Sequence
  Description of Artificial Sequence: Synthetic oligonucleotide
acgugcagaggccuuuggc

SEQ ID NO: 164572 - RNA, 19 nt, Artificial Sequence
  Description of Artificial Sequence: Synthetic oligonucleotide
cauggacccugcccggccu

SEQ ID NO: 164573 - RNA, 19 nt, Artificial Sequence
  Description of Artificial Sequence: Synthetic oligonucleotide
ugaccaagccagcacugug

SEQ ID NO: 164574 - RNA, 19 nt, Artificial Sequence
  Description of Artificial Sequence: Synthetic oligonucleotide
ggccgucaagaugcucaaa

SEQ ID NO: 164575 - RNA, 19 nt, Artificial Sequence
  Description of Artificial Sequence: Synthetic oligonucleotide
agacaacgccucugacaag

SEQ ID NO: 164576 - RNA, 19 nt, Artificial Sequence
  Description of Artificial Sequence: Synthetic oligonucleotide
ggaccuggccgaccugguc

SEQ ID NO: 164577 - RNA, 19 nt, Artificial Sequence
  Description of Artificial Sequence: Synthetic oligonucleotide
cucggagauggaggugaug

SEQ ID NO: 164578 - RNA, 19 nt, Artificial Sequence
  Description of Artificial Sequence: Synthetic oligonucleotide
gaagcugaucggccgacac

SEQ ID NO: 164579 - RNA, 19 nt, Artificial Sequence
  Description of Artificial Sequence: Synthetic oligonucleotide
caagaacaucaucaaccug

SEQ ID NO: 164580 - RNA, 19 nt, Artificial Sequence
  Description of Artificial Sequence: Synthetic oligonucleotide
gcuuggugucugcacccag

SEQ ID NO: 164581 - RNA, 19 nt, Artificial Sequence
  Description of Artificial Sequence: Synthetic oligonucleotide
ggaagggccccuguacgug

SEQ ID NO: 164582 - RNA, 19 nt, Artificial Sequence
  Description of Artificial Sequence: Synthetic oligonucleotide
gaucguggagugcgccgcc

SEQ ID NO: 164583 - RNA, 19 nt, Artificial Sequence
  Description of Artificial Sequence: Synthetic oligonucleotide
caagggaaaccugcgggag

SEQ ID NO: 164584 - RNA, 19 nt, Artificial Sequence
  Description of Artificial Sequence: Synthetic oligonucleotide
guuccugcgggcccggcgc

SEQ ID NO: 164585 - RNA, 19 nt, Artificial Sequence
  Description of Artificial Sequence: Synthetic oligonucleotide
ccccccaggccccgaccuc

SEQ ID NO: 164586 - RNA, 19 nt, Artificial Sequence
  Description of Artificial Sequence: Synthetic oligonucleotide
cagccccgacgguccucgg

SEQ ID NO: 164587 - RNA, 19 nt, Artificial Sequence
  Description of Artificial Sequence: Synthetic oligonucleotide
gagcagugaggggccgcuc

SEQ ID NO: 164588 - RNA, 19 nt, Artificial Sequence
  Description of Artificial Sequence: Synthetic oligonucleotide
cuccuucccaguccugguc

SEQ ID NO: 164589 - RNA, 19 nt, Artificial Sequence
  Description of Artificial Sequence: Synthetic oligonucleotide
cuccugcgccuaccaggug

SEQ ID NO: 164590 - RNA, 19 nt, Artificial Sequence
  Description of Artificial Sequence: Synthetic oligonucleotide
ggcccgaggcaugcaguau

SEQ ID NO: 164591 - RNA, 19 nt, Artificial Sequence
  Description of Artificial Sequence: Synthetic oligonucleotide
ucuggagucccggaagugu

SEQ ID NO: 164592 - RNA, 19 nt, Artificial Sequence
  Description of Artificial Sequence: Synthetic oligonucleotide
uauccaccgggaccuggcu

SEQ ID NO: 164593 - RNA, 19 nt, Artificial Sequence
  Description of Artificial Sequence: Synthetic oligonucleotide
ugcccgcaaugugcuggug

SEQ ID NO: 164594 - RNA, 19 nt, Artificial Sequence
  Description of Artificial Sequence: Synthetic oligonucleotide
gacugaggacaaugugaug

SEQ ID NO: 164595 - RNA, 19 nt, Artificial Sequence
  Description of Artificial Sequence: Synthetic oligonucleotide
gaagauugcugacuuuggg

SEQ ID NO: 164596 - RNA, 19 nt, Artificial Sequence
  Description of Artificial Sequence: Synthetic oligonucleotide
gcuggcccgcggcguccac

SEQ ID NO: 164597 - RNA, 19 nt, Artificial Sequence
  Description of Artificial Sequence: Synthetic oligonucleotide
ccacauugacuacuauaag

SEQ ID NO: 164598 - RNA, 19 nt, Artificial Sequence
  Description of Artificial Sequence: Synthetic oligonucleotide
gaaaaccagcaacggccgc

SEQ ID NO: 164599 - RNA, 19 nt, Artificial Sequence
  Description of Artificial Sequence: Synthetic oligonucleotide
ccugccugugaaguggaug

SEQ ID NO: 164600 - RNA, 19 nt, Artificial Sequence
  Description of Artificial Sequence: Synthetic oligonucleotide
ggcgcccgaggccuuguuu

SEQ ID NO: 164601 - RNA, 19 nt, Artificial Sequence
  Description of Artificial Sequence: Synthetic oligonucleotide
ugaccggguguacacacac

SEQ ID NO: 164602 - RNA, 19 nt, Artificial Sequence
  Description of Artificial Sequence: Synthetic oligonucleotide
ccagagugacguguggucu

SEQ ID NO: 164603 - RNA, 19 nt, Artificial Sequence
  Description of Artificial Sequence: Synthetic oligonucleotide
uuuugggauccugcuaugg

SEQ ID NO: 164604 - RNA, 19 nt, Artificial Sequence
  Description of Artificial Sequence: Synthetic oligonucleotide
ggagaucuucacccucggg

SEQ ID NO: 164605 - RNA, 19 nt, Artificial Sequence
  Description of Artificial Sequence: Synthetic oligonucleotide
gggcuccccguauccuggc

SEQ ID NO: 164606 - RNA, 19 nt, Artificial Sequence
  Description of Artificial Sequence: Synthetic oligonucleotide
caucccgguggaggagcug

SEQ ID NO: 164607 - RNA, 19 nt, Artificial Sequence
  Description of Artificial Sequence: Synthetic oligonucleotide
guucucgcugcugcgggag

SEQ ID NO: 164608 - RNA, 19 nt, Artificial Sequence
  Description of Artificial Sequence: Synthetic oligonucleotide
gggacaucggauggaccga

SEQ ID NO: 164609 - RNA, 19 nt, Artificial Sequence
  Description of Artificial Sequence: Synthetic oligonucleotide
acccccacacugcccccca

SEQ ID NO: 164610 - RNA, 19 nt, Artificial Sequence
  Description of Artificial Sequence: Synthetic oligonucleotide
agagcuguacgggcugaug

SEQ ID NO: 164611 - RNA, 19 nt, Artificial Sequence
  Description of Artificial Sequence: Synthetic oligonucleotide
gcgugagugcuggcacgca

SEQ ID NO: 164612 - RNA, 19 nt, Artificial Sequence
  Description of Artificial Sequence: Synthetic oligonucleotide
agcgcccucccagaggccu

SEQ ID NO: 164613 - RNA, 19 nt, Artificial Sequence
  Description of Artificial Sequence: Synthetic oligonucleotide
uaccuucaagcagcuggug

SEQ ID NO: 164614 - RNA, 19 nt, Artificial Sequence
  Description of Artificial Sequence: Synthetic oligonucleotide
ggaggcgcuggacaagguc

SEQ ID NO: 164615 - RNA, 19 nt, Artificial Sequence
  Description of Artificial Sequence: Synthetic oligonucleotide
ccugcuggccgucucugag

SEQ ID NO: 164616 - RNA, 19 nt, Artificial Sequence
  Description of Artificial Sequence: Synthetic oligonucleotide
ggaguaccucgaccuccgc

SEQ ID NO: 164617 - RNA, 19 nt, Artificial Sequence
  Description of Artificial Sequence: Synthetic oligonucleotide
ccugaccuucggacccuau

SEQ ID NO: 164618 - RNA, 19 nt, Artificial Sequence
  Description of Artificial Sequence: Synthetic oligonucleotide
uucccccucugguggggac

SEQ ID NO: 164619 - RNA, 19 nt, Artificial Sequence
  Description of Artificial Sequence: Synthetic oligonucleotide
cgccagcagcaccugcucc

SEQ ID NO: 164620 - RNA, 19 nt, Artificial Sequence
  Description of Artificial Sequence: Synthetic oligonucleotide
cuccagcgauucugucuuc

SEQ ID NO: 164621 - RNA, 19 nt, Artificial Sequence
  Description of Artificial Sequence: Synthetic oligonucleotide
cagccacgacccccugcca

SEQ ID NO: 164622 - RNA, 19 nt, Artificial Sequence
  Description of Artificial Sequence: Synthetic oligonucleotide
auugggauccagcuccuuc

SEQ ID NO: 164623 - RNA, 19 nt, Artificial Sequence
  Description of Artificial Sequence: Synthetic oligonucleotide
ccccuucgggucuggggug

SEQ ID NO: 164624 - RNA, 19 nt, Artificial Sequence
  Description of Artificial Sequence: Synthetic oligonucleotide
gcagacaugagcaaggcuc

SEQ ID NO: 164625 - RNA, 19 nt, Artificial Sequence
  Description of Artificial Sequence: Synthetic oligonucleotide
caaggcugugcaggcacau

SEQ ID NO: 164626 - RNA, 19 nt, Artificial Sequence
  Description of Artificial Sequence: Synthetic oligonucleotide
uaggcugguggccuugggc

SEQ ID NO: 164627 - RNA, 19 nt, Artificial Sequence
  Description of Artificial Sequence: Synthetic oligonucleotide
ccuuggggcucagccacag

SEQ ID NO: 164628 - RNA, 19 nt, Artificial Sequence
  Description of Artificial Sequence: Synthetic oligonucleotide
gccugacacagugcucgac

SEQ ID NO: 164629 - RNA, 19 nt, Artificial Sequence
  Description of Artificial Sequence: Synthetic oligonucleotide
ccuugauagcauggggccc

SEQ ID NO: 164630 - RNA, 19 nt, Artificial Sequence
  Description of Artificial Sequence: Synthetic oligonucleotide
ccuggcccagaguugcugu

SEQ ID NO: 164631 - RNA, 19 nt, Artificial Sequence
  Description of Artificial Sequence: Synthetic oligonucleotide
ugccguguccaagggccgu

SEQ ID NO: 164632 - RNA, 19 nt, Artificial Sequence
  Description of Artificial Sequence: Synthetic oligonucleotide
ugcccuugcccuuggagcu

SEQ ID NO: 164633 - RNA, 19 nt, Artificial Sequence
  Description of Artificial Sequence: Synthetic oligonucleotide
ugccgugccuguguccuga

SEQ ID NO: 164634 - RNA, 19 nt, Artificial Sequence
  Description of Artificial Sequence: Synthetic oligonucleotide
auggcccaaaugucagggu

SEQ ID NO: 164635 - RNA, 19 nt, Artificial Sequence
  Description of Artificial Sequence: Synthetic oligonucleotide
uucugcucggcuucuugga

SEQ ID NO: 164636 - RNA, 19 nt, Artificial Sequence
  Description of Artificial Sequence: Synthetic oligonucleotide
accuuggcgcuuagucccc

SEQ ID NO: 164637 - RNA, 19 nt, Artificial Sequence
  Description of Artificial Sequence: Synthetic oligonucleotide
caucccggguuuggcugag

SEQ ID NO: 164638 - RNA, 19 nt, Artificial Sequence
  Description of Artificial Sequence: Synthetic oligonucleotide
gccuggcuggagagcugcu

SEQ ID NO: 164639 - RNA, 19 nt, Artificial Sequence
  Description of Artificial Sequence: Synthetic oligonucleotide
uaugcuaaaccuccugccu

SEQ ID NO: 164640 - RNA, 19 nt, Artificial Sequence
  Description of Artificial Sequence: Synthetic oligonucleotide
ucccaauaccagcaggagg

SEQ ID NO: 164641 - RNA, 19 nt, Artificial Sequence
  Description of Artificial Sequence: Synthetic oligonucleotide
guucugggccucugaaccc

SEQ ID NO: 164642 - RNA, 19 nt, Artificial Sequence
  Description of Artificial Sequence: Synthetic oligonucleotide
cccuuuccccacaccuccc

SEQ ID NO: 164643 - RNA, 19 nt, Artificial Sequence
  Description of Artificial Sequence: Synthetic oligonucleotide
cccugcugcugcugcccca

SEQ ID NO: 164644 - RNA, 19 nt, Artificial Sequence
  Description of Artificial Sequence: Synthetic oligonucleotide
agcgucuugacgggagcau

SEQ ID NO: 164645 - RNA, 19 nt, Artificial Sequence
  Description of Artificial Sequence: Synthetic oligonucleotide
uuggccccugagcccagag

SEQ ID NO: 164646 - RNA, 19 nt, Artificial Sequence
  Description of Artificial Sequence: Synthetic oligonucleotide
gaagcuggaagccugccga

SEQ ID NO: 164647 - RNA, 19 nt, Artificial Sequence
  Description of Artificial Sequence: Synthetic oligonucleotide
aaaacaggagcaaauggcg

SEQ ID NO: 164648 - RNA, 19 nt, Artificial Sequence
  Description of Artificial Sequence: Synthetic oligonucleotide
guuuuauaaauuauuuuuu

SEQ ID NO: 164649 - RNA, 19 nt, Artificial Sequence
  Description of Artificial Sequence: Synthetic oligonucleotide
gaaggcaguuggugggaag

SEQ ID NO: 164650 - RNA, 19 nt, Artificial Sequence
  Description of Artificial Sequence: Synthetic oligonucleotide
guccagcuugggucccuga

SEQ ID NO: 164651 - RNA, 19 nt, Artificial Sequence
  Description of Artificial Sequence: Synthetic oligonucleotide
agagcugugagaaggagau

SEQ ID NO: 164652 - RNA, 19 nt, Artificial Sequence
  Description of Artificial Sequence: Synthetic oligonucleotide
ugcggcugcugcuggcccu

SEQ ID NO: 164653 - RNA, 19 nt, Artificial Sequence
  Description of Artificial Sequence: Synthetic oligonucleotide
uguuggggguccugcugag

SEQ ID NO: 164654 - RNA, 19 nt, Artificial Sequence
  Description of Artificial Sequence: Synthetic oligonucleotide
gugugccugggccuccagu

SEQ ID NO: 164655 - RNA, 19 nt, Artificial Sequence
  Description of Artificial Sequence: Synthetic oligonucleotide
ucuugucccuggaggccuc

SEQ ID NO: 164656 - RNA, 19 nt, Artificial Sequence
  Description of Artificial Sequence: Synthetic oligonucleotide
cugaggaaguggagcuuga

SEQ ID NO: 164657 - RNA, 19 nt, Artificial Sequence
  Description of Artificial Sequence: Synthetic oligonucleotide
agcccugccuggcucccag

SEQ ID NO: 164658 - RNA, 19 nt, Artificial Sequence
  Description of Artificial Sequence: Synthetic oligonucleotide
gccuggagcagcaagagca

SEQ ID NO: 164659 - RNA, 19 nt, Artificial Sequence
  Description of Artificial Sequence: Synthetic oligonucleotide
aggagcugacaguagcccu

SEQ ID NO: 164660 - RNA, 19 nt, Artificial Sequence
  Description of Artificial Sequence: Synthetic oligonucleotide
uugggcagccugugcgucu

SEQ ID NO: 164661 - RNA, 19 nt, Artificial Sequence
  Description of Artificial Sequence: Synthetic oligonucleotide
ugugcugugggcgggcuga

SEQ ID NO: 164662 - RNA, 19 nt, Artificial Sequence
  Description of Artificial Sequence: Synthetic oligonucleotide
agcgugguggccacuggua

SEQ ID NO: 164663 - RNA, 19 nt, Artificial Sequence
  Description of Artificial Sequence: Synthetic oligonucleotide
acaaggagggcagucgccu

SEQ ID NO: 164664 - RNA, 19 nt, Artificial Sequence
  Description of Artificial Sequence: Synthetic oligonucleotide
uggcaccugcuggccgugu

SEQ ID NO: 164665 - RNA, 19 nt, Artificial Sequence
  Description of Artificial Sequence: Synthetic oligonucleotide
uacggggcuggaggggccg

SEQ ID NO: 164666 - RNA, 19 nt, Artificial Sequence
  Description of Artificial Sequence: Synthetic oligonucleotide
gccuagagauugccagcuu

SEQ ID NO: 164667 - RNA, 19 nt, Artificial Sequence
  Description of Artificial Sequence: Synthetic oligonucleotide
uccuaccugaggaugcugg

SEQ ID NO: 164668 - RNA, 19 nt, Artificial Sequence
  Description of Artificial Sequence: Synthetic oligonucleotide
gccgcuaccucugccuggc

SEQ ID NO: 164669 - RNA, 19 nt, Artificial Sequence
  Description of Artificial Sequence: Synthetic oligonucleotide
cacgaggcuccaugaucgu

SEQ ID NO: 164670 - RNA, 19 nt, Artificial Sequence
  Description of Artificial Sequence: Synthetic oligonucleotide
uccugcagaaucucaccuu

SEQ ID NO: 164671 - RNA, 19 nt, Artificial Sequence
  Description of Artificial Sequence: Synthetic oligonucleotide
ugauuacaggugacuccuu

SEQ ID NO: 164672 - RNA, 19 nt, Artificial Sequence
  Description of Artificial Sequence: Synthetic oligonucleotide
ugaccuccagcaacgauga

SEQ ID NO: 164673 - RNA, 19 nt, Artificial Sequence
  Description of Artificial Sequence: Synthetic oligonucleotide
augaggaccccaaguccca

SEQ ID NO: 164674 - RNA, 19 nt, Artificial Sequence
  Description of Artificial Sequence: Synthetic oligonucleotide
auagggaccccucgaauag

SEQ ID NO: 164675 - RNA, 19 nt, Artificial Sequence
  Description of Artificial Sequence: Synthetic oligonucleotide
ggcacaguuacccccagca

SEQ ID NO: 164676 - RNA, 19 nt, Artificial Sequence
  Description of Artificial Sequence: Synthetic oligonucleotide
aagcacccuacuggacaca

SEQ ID NO: 164677 - RNA, 19 nt, Artificial Sequence
  Description of Artificial Sequence: Synthetic oligonucleotide
acccccagcgcauggagaa

SEQ ID NO: 164678 - RNA, 19 nt, Artificial Sequence
  Description of Artificial Sequence: Synthetic oligonucleotide
agaaacugcaugcaguacc

SEQ ID NO: 164679 - RNA, 19 nt, Artificial Sequence
  Description of Artificial Sequence: Synthetic oligonucleotide
cugcggggaacaccgucaa

SEQ ID NO: 164680 - RNA, 19 nt, Artificial Sequence
  Description of Artificial Sequence: Synthetic oligonucleotide
aguuccgcuguccagcugc

SEQ ID NO: 164681 - RNA, 19 nt, Artificial Sequence
  Description of Artificial Sequence: Synthetic oligonucleotide
caggcaaccccacgcccac

SEQ ID NO: 164682 - RNA, 19 nt, Artificial Sequence
  Description of Artificial Sequence: Synthetic oligonucleotide
ccauccgcuggcuuaagga

SEQ ID NO: 164683 - RNA, 19 nt, Artificial Sequence
  Description of Artificial Sequence: Synthetic oligonucleotide
auggacaggccuuucaugg

SEQ ID NO: 164684 - RNA, 19 nt, Artificial Sequence
  Description of Artificial Sequence: Synthetic oligonucleotide
gggagaaccgcauuggagg

SEQ ID NO: 164685 - RNA, 19 nt, Artificial Sequence
  Description of Artificial Sequence: Synthetic oligonucleotide
gcauucggcugcgccauca

SEQ ID NO: 164686 - RNA, 19 nt, Artificial Sequence
  Description of Artificial Sequence: Synthetic oligonucleotide
agcacuggagucucgugau

SEQ ID NO: 164687 - RNA, 19 nt, Artificial Sequence
  Description of Artificial Sequence: Synthetic oligonucleotide
uggagagcguggugcccuc

SEQ ID NO: 164688 - RNA, 19 nt, Artificial Sequence
  Description of Artificial Sequence: Synthetic oligonucleotide
cggaccgcggcacauacac

SEQ ID NO: 164689 - RNA, 19 nt, Artificial Sequence
  Description of Artificial Sequence: Synthetic oligonucleotide
ccugccugguagagaacgc

SEQ ID NO: 164690 - RNA, 19 nt, Artificial Sequence
  Description of Artificial Sequence: Synthetic oligonucleotide
cugugggcagcauccgcua

SEQ ID NO: 164691 - RNA, 19 nt, Artificial Sequence
  Description of Artificial Sequence: Synthetic oligonucleotide
auaacuaccugcuagaugu

SEQ ID NO: 164692 - RNA, 19 nt, Artificial Sequence
  Description of Artificial Sequence: Synthetic oligonucleotide
ugcuggagcgguccccgca

SEQ ID NO: 164693 - RNA, 19 nt, Artificial Sequence
  Description of Artificial Sequence: Synthetic oligonucleotide
accggcccauccugcaggc

SEQ ID NO: 164694 - RNA, 19 nt, Artificial Sequence
  Description of Artificial Sequence: Synthetic oligonucleotide
ccgggcucccggccaacac

SEQ ID NO: 164695 - RNA, 19 nt, Artificial Sequence
  Description of Artificial Sequence: Synthetic oligonucleotide
ccacagccguggugggcag

SEQ ID NO: 164696 - RNA, 19 nt, Artificial Sequence
  Description of Artificial Sequence: Synthetic oligonucleotide
gcgacguggagcugcugug

SEQ ID NO: 164697 - RNA, 19 nt, Artificial Sequence
  Description of Artificial Sequence: Synthetic oligonucleotide
gcaagguguacagcgaugc

SEQ ID NO: 164698 - RNA, 19 nt, Artificial Sequence
  Description of Artificial Sequence: Synthetic oligonucleotide
cccagccccacauccagug

SEQ ID NO: 164699 - RNA, 19 nt, Artificial Sequence
  Description of Artificial Sequence: Synthetic oligonucleotide
ggcugaagcacaucgucau

SEQ ID NO: 164700 - RNA, 19 nt, Artificial Sequence
  Description of Artificial Sequence: Synthetic oligonucleotide
ucaacggcagcagcuucgg

SEQ ID NO: 164701 - RNA, 19 nt, Artificial Sequence
  Description of Artificial Sequence: Synthetic oligonucleotide
gagccgacgguuuccccua

SEQ ID NO: 164702 - RNA, 19 nt, Artificial Sequence
  Description of Artificial Sequence: Synthetic oligonucleotide
augugcaaguccuaaagac

SEQ ID NO: 164703 - RNA, 19 nt, Artificial Sequence
  Description of Artificial Sequence: Synthetic oligonucleotide
cugcagacaucaauagcuc

SEQ ID NO: 164704 - RNA, 19 nt, Artificial Sequence
  Description of Artificial Sequence: Synthetic oligonucleotide
cagagguggagguccugua

SEQ ID NO: 164705 - RNA, 19 nt, Artificial Sequence
  Description of Artificial Sequence: Synthetic oligonucleotide
accugcggaacgugucagc

SEQ ID NO: 164706 - RNA, 19 nt, Artificial Sequence
  Description of Artificial Sequence: Synthetic oligonucleotide
ccgaggacgcaggcgagua

SEQ ID NO: 164707 - RNA, 19 nt, Artificial Sequence
  Description of Artificial Sequence: Synthetic oligonucleotide
acaccugccucgcaggcaa

SEQ ID NO: 164708 - RNA, 19 nt, Artificial Sequence
  Description of Artificial Sequence: Synthetic oligonucleotide
auuccaucggccucuccua

SEQ ID NO: 164709 - RNA, 19 nt, Artificial Sequence
  Description of Artificial Sequence: Synthetic oligonucleotide
accagucugccuggcucac

SEQ ID NO: 164710 - RNA, 19 nt, Artificial Sequence
  Description of Artificial Sequence: Synthetic oligonucleotide
cggugcugccagguacugg

SEQ ID NO: 164711 - RNA, 19 nt, Artificial Sequence
  Description of Artificial Sequence: Synthetic oligonucleotide
ggcgcaucccccaccucac

SEQ ID NO: 164712 - RNA, 19 nt, Artificial Sequence
  Description of Artificial Sequence: Synthetic oligonucleotide
caugugacagccugacucc

SEQ ID NO: 164713 - RNA, 19 nt, Artificial Sequence
  Description of Artificial Sequence: Synthetic oligonucleotide
cagcaggcagaaccaaguc

SEQ ID NO: 164714 - RNA, 19 nt, Artificial Sequence
  Description of Artificial Sequence: Synthetic oligonucleotide
cucccacuuugcaguucuc

SEQ ID NO: 164715 - RNA, 25 nt, Artificial Sequence
  Description of Artificial Sequence: Synthetic oligonucleotide
cucgcucccggccgaggagcgcucg

SEQ ID NO: 164716 - RNA, 25 nt, Artificial Sequence
  Description of Artificial Sequence: Synthetic oligonucleotide
gggcugucugcggacccugccgcgu

SEQ ID NO: 164717 - RNA, 25 nt, Artificial Sequence
  Description of Artificial Sequence: Synthetic oligonucleotide
ugcaggggucgcggccggcuggagc

SEQ ID NO: 164718 - RNA, 25 nt, Artificial Sequence
  Description of Artificial Sequence: Synthetic oligonucleotide
cugggagugaggcggcggaggagcc

SEQ ID NO: 164719 - RNA, 25 nt, Artificial Sequence
  Description of Artificial Sequence: Synthetic oligonucleotide
caggugaggaggagccaggaaggca

SEQ ID NO: 164720 - RNA, 25 nt, Artificial Sequence
  Description of Artificial Sequence: Synthetic oligonucleotide
aguuggugggaaguccagcuugggu

SEQ ID NO: 164721 - RNA, 25 nt, Artificial Sequence
  Description of Artificial Sequence: Synthetic oligonucleotide
ucccugagagcugugagaaggagau

SEQ ID NO: 164722 - RNA, 25 nt, Artificial Sequence
  Description of Artificial Sequence: Synthetic oligonucleotide
ugcggcugcugcuggcccuguuggg

SEQ ID NO: 164723 - RNA, 25 nt, Artificial Sequence
  Description of Artificial Sequence: Synthetic oligonucleotide
ggguccugcugagugugccugggcc

SEQ ID NO: 164724 - RNA, 25 nt, Artificial Sequence
  Description of Artificial Sequence: Synthetic oligonucleotide
cuccagucuugucccuggaggccuc

SEQ ID NO: 164725 - RNA, 25 nt, Artificial Sequence
  Description of Artificial Sequence: Synthetic oligonucleotide
cugaggaaguggagcuugagcccug

SEQ ID NO: 164726 - RNA, 25 nt, Artificial Sequence
  Description of Artificial Sequence: Synthetic oligonucleotide
gccuggcucccagccuggagcagca

SEQ ID NO: 164727 - RNA, 25 nt, Artificial Sequence
  Description of Artificial Sequence: Synthetic oligonucleotide
aagagcaggagcugacaguagcccu

SEQ ID NO: 164728 - RNA, 25 nt, Artificial Sequence
  Description of Artificial Sequence: Synthetic oligonucleotide
uugggcagccugugcgucugugcug

SEQ ID NO: 164729 - RNA, 25 nt, Artificial Sequence
  Description of Artificial Sequence: Synthetic oligonucleotide
gugggcgggcugagcgugguggcca

SEQ ID NO: 164730 - RNA, 25 nt, Artificial Sequence
  Description of Artificial Sequence: Synthetic oligonucleotide
acugguacaaggagggcagucgccu

SEQ ID NO: 164731 - RNA, 25 nt, Artificial Sequence
  Description of Artificial Sequence: Synthetic oligonucleotide
uggcaccugcuggccguguacgggg

SEQ ID NO: 164732 - RNA, 25 nt, Artificial Sequence
  Description of Artificial Sequence: Synthetic oligonucleotide
gcuggaggggccgccuagagauugc

SEQ ID NO: 164733 - RNA, 25 nt, Artificial Sequence
  Description of Artificial Sequence: Synthetic oligonucleotide
ccagcuuccuaccugaggaugcugg

SEQ ID NO: 164734 - RNA, 25 nt, Artificial Sequence
  Description of Artificial Sequence: Synthetic oligonucleotide
gccgcuaccucugccuggcacgagg

SEQ ID NO: 164735 - RNA, 25 nt, Artificial Sequence
  Description of Artificial Sequence: Synthetic oligonucleotide
gcuccaugaucguccugcagaaucu

SEQ ID NO: 164736 - RNA, 25 nt, Artificial Sequence
  Description of Artificial Sequence: Synthetic oligonucleotide
ucaccuugauuacaggugacuccuu

SEQ ID NO: 164737 - RNA, 25 nt, Artificial Sequence
  Description of Artificial Sequence: Synthetic oligonucleotide
ugaccuccagcaacgaugaugagga

SEQ ID NO: 164738 - RNA, 25 nt, Artificial Sequence
  Description of Artificial Sequence: Synthetic oligonucleotide
accccaagucccauagggaccccuc

SEQ ID NO: 164739 - RNA, 25 nt, Artificial Sequence
  Description of Artificial Sequence: Synthetic oligonucleotide
cgaauaggcacaguuacccccagca

SEQ ID NO: 164740 - RNA, 25 nt, Artificial Sequence
  Description of Artificial Sequence: Synthetic oligonucleotide
aagcacccuacuggacacaccccca

SEQ ID NO: 164741 - RNA, 25 nt, Artificial Sequence
  Description of Artificial Sequence: Synthetic oligonucleotide
agcgcauggagaagaaacugcaugc

SEQ ID NO: 164742 - RNA, 25 nt, Artificial Sequence
  Description of Artificial Sequence: Synthetic oligonucleotide
caguaccugcggggaacaccgucaa

SEQ ID NO: 164743 - RNA, 25 nt, Artificial Sequence
  Description of Artificial Sequence: Synthetic oligonucleotide
aguuccgcuguccagcugcaggcaa

SEQ ID NO: 164744 - RNA, 25 nt, Artificial Sequence
  Description of Artificial Sequence: Synthetic oligonucleotide
accccacgcccaccauccgcuggcu

SEQ ID NO: 164745 - RNA, 25 nt, Artificial Sequence
  Description of Artificial Sequence: Synthetic oligonucleotide
uuaaggauggacaggccuuucaugg

SEQ ID NO: 164746 - RNA, 25 nt, Artificial Sequence
  Description of Artificial Sequence: Synthetic oligonucleotide
gggagaaccgcauuggaggcauucg

SEQ ID NO: 164747 - RNA, 25 nt, Artificial Sequence
  Description of Artificial Sequence: Synthetic oligonucleotide
ggcugcgccaucagcacuggagucu

SEQ ID NO: 164748 - RNA, 25 nt, Artificial Sequence
  Description of Artificial Sequence: Synthetic oligonucleotide
ucgugauggagagcguggugcccuc

SEQ ID NO: 164749 - RNA, 25 nt, Artificial Sequence
  Description of Artificial Sequence: Synthetic oligonucleotide
cggaccgcggcacauacaccugccu

SEQ ID NO: 164750 - RNA, 25 nt, Artificial Sequence
  Description of Artificial Sequence: Synthetic oligonucleotide
ugguagagaacgcugugggcagcau

SEQ ID NO: 164751 - RNA, 25 nt, Artificial Sequence
  Description of Artificial Sequence: Synthetic oligonucleotide
uccgcuauaacuaccugcuagaugu

SEQ ID NO: 164752 - RNA, 25 nt, Artificial Sequence
  Description of Artificial Sequence: Synthetic oligonucleotide
ugcuggagcgguccccgcaccggcc

SEQ ID NO: 164753 - RNA, 25 nt, Artificial Sequence
  Description of Artificial Sequence: Synthetic oligonucleotide
ccauccugcaggccgggcucccggc

SEQ ID NO: 164754 - RNA, 25 nt, Artificial Sequence
  Description of Artificial Sequence: Synthetic oligonucleotide
ccaacaccacagccguggugggcag

SEQ ID NO: 164755 - RNA, 25 nt, Artificial Sequence
  Description of Artificial Sequence: Synthetic oligonucleotide
gcgacguggagcugcugugcaaggu

SEQ ID NO: 164756 - RNA, 25 nt, Artificial Sequence
  Description of Artificial Sequence: Synthetic oligonucleotide
uguacagcgaugcccagccccacau

SEQ ID NO: 164757 - RNA, 25 nt, Artificial Sequence
  Description of Artificial Sequence: Synthetic oligonucleotide
uccaguggcugaagcacaucgucau

SEQ ID NO: 164758 - RNA, 25 nt, Artificial Sequence
  Description of Artificial Sequence: Synthetic oligonucleotide
ucaacggcagcagcuucggagccga

SEQ ID NO: 164759 - RNA, 25 nt, Artificial Sequence
  Description of Artificial Sequence: Synthetic oligonucleotide
acgguuuccccuaugugcaaguccu

SEQ ID NO: 164760 - RNA, 25 nt, Artificial Sequence
  Description of Artificial Sequence: Synthetic oligonucleotide
uaaagacugcagacaucaauagcuc

SEQ ID NO: 164761 - RNA, 25 nt, Artificial Sequence
  Description of Artificial Sequence: Synthetic oligonucleotide
cagagguggagguccuguaccugcg

SEQ ID NO: 164762 - RNA, 25 nt, Artificial Sequence
  Description of Artificial Sequence: Synthetic oligonucleotide
ggaacgugucagccgaggacgcagg

SEQ ID NO: 164763 - RNA, 25 nt, Artificial Sequence
  Description of Artificial Sequence: Synthetic oligonucleotide
gcgaguacaccugccucgcaggcaa

SEQ ID NO: 164764 - RNA, 25 nt, Artificial Sequence
  Description of Artificial Sequence: Synthetic oligonucleotide
auuccaucggccucuccuaccaguc

SEQ ID NO: 164765 - RNA, 25 nt, Artificial Sequence
  Description of Artificial Sequence: Synthetic oligonucleotide
cugccuggcucacggugcugccaga

SEQ ID NO: 164766 - RNA, 25 nt, Artificial Sequence
  Description of Artificial Sequence: Synthetic oligonucleotide
aggaggaccccacauggaccgcagc

SEQ ID NO: 164767 - RNA, 25 nt, Artificial Sequence
  Description of Artificial Sequence: Synthetic oligonucleotide
cagcgcccgaggccagguauacgga

SEQ ID NO: 164768 - RNA, 25 nt, Artificial Sequence
  Description of Artificial Sequence: Synthetic oligonucleotide
acaucauccuguacgcgucgggcuc

SEQ ID NO: 164769 - RNA, 25 nt, Artificial Sequence
  Description of Artificial Sequence: Synthetic oligonucleotide
cccuggccuuggcugugcuccugcu

SEQ ID NO: 164770 - RNA, 25 nt, Artificial Sequence
  Description of Artificial Sequence: Synthetic oligonucleotide
ugcuggccgggcuguaucgagggca

SEQ ID NO: 164771 - RNA, 25 nt, Artificial Sequence
  Description of Artificial Sequence: Synthetic oligonucleotide
aggcgcuccacggccggcacccccg

SEQ ID NO: 164772 - RNA, 25 nt, Artificial Sequence
  Description of Artificial Sequence: Synthetic oligonucleotide
gcccgcccgccacugugcagaagcu

SEQ ID NO: 164773 - RNA, 25 nt, Artificial Sequence
  Description of Artificial Sequence: Synthetic oligonucleotide
ucucccgcuucccucuggcccgaca

SEQ ID NO: 164774 - RNA, 25 nt, Artificial Sequence
  Description of Artificial Sequence: Synthetic oligonucleotide
aguucucccuggagucaggcucuuc

SEQ ID NO: 164775 - RNA, 25 nt, Artificial Sequence
  Description of Artificial Sequence: Synthetic oligonucleotide
ccggcaagucaagcucaucccuggu

SEQ ID NO: 164776 - RNA, 25 nt, Artificial Sequence
  Description of Artificial Sequence: Synthetic oligonucleotide
uacgaggcgugcgucucuccuccag

SEQ ID NO: 164777 - RNA, 25 nt, Artificial Sequence
  Description of Artificial Sequence: Synthetic oligonucleotide
gcggccccgccuugcucgccggccu

SEQ ID NO: 164778 - RNA, 25 nt, Artificial Sequence
  Description of Artificial Sequence: Synthetic oligonucleotide
ucgugagucuagaucuaccucucga

SEQ ID NO: 164779 - RNA, 25 nt, Artificial Sequence
  Description of Artificial Sequence: Synthetic oligonucleotide
acccacuaugggaguucccccggga

SEQ ID NO: 164780 - RNA, 25 nt, Artificial Sequence
  Description of Artificial Sequence: Synthetic oligonucleotide
acaggcuggugcuugggaagccccu

SEQ ID NO: 164781 - RNA, 25 nt, Artificial Sequence
  Description of Artificial Sequence: Synthetic oligonucleotide
uaggcgagggcugcuuuggccaggu

SEQ ID NO: 164782 - RNA, 25 nt, Artificial Sequence
  Description of Artificial Sequence: Synthetic oligonucleotide
uaguacgugcagaggccuuuggcau

SEQ ID NO: 164783 - RNA, 25 nt, Artificial Sequence
  Description of Artificial Sequence: Synthetic oligonucleotide
uggacccugcccggccugaccaagc

SEQ ID NO: 164784 - RNA, 25 nt, Artificial Sequence
  Description of Artificial Sequence: Synthetic oligonucleotide
ccagcacuguggccgucaagaugcu

SEQ ID NO: 164785 - RNA, 25 nt, Artificial Sequence
  Description of Artificial Sequence: Synthetic oligonucleotide
ucaaagacaacgccucugacaagga

SEQ ID NO: 164786 - RNA, 25 nt, Artificial Sequence
  Description of Artificial Sequence: Synthetic oligonucleotide
accuggccgaccuggucucggagau

SEQ ID NO: 164787 - RNA, 25 nt, Artificial Sequence
  Description of Artificial Sequence: Synthetic oligonucleotide
uggaggugaugaagcugaucggccg

SEQ ID NO: 164788 - RNA, 25 nt, Artificial Sequence
  Description of Artificial Sequence: Synthetic oligonucleotide
gacacaagaacaucaucaaccugcu

SEQ ID NO: 164789 - RNA, 25 nt, Artificial Sequence
  Description of Artificial Sequence: Synthetic oligonucleotide
uuggugucugcacccaggaagggcc

SEQ ID NO: 164790 - RNA, 25 nt, Artificial Sequence
  Description of Artificial Sequence: Synthetic oligonucleotide
cccuguacgugaucguggagugcgc

SEQ ID NO: 164791 - RNA, 25 nt, Artificial Sequence
  Description of Artificial Sequence: Synthetic oligonucleotide
ccgccaagggaaaccugcgggaguu

SEQ ID NO: 164792 - RNA, 25 nt, Artificial Sequence
  Description of Artificial Sequence: Synthetic oligonucleotide
uccugcgggcccggcgccccccagg

SEQ ID NO: 164793 - RNA, 25 nt, Artificial Sequence
  Description of Artificial Sequence: Synthetic oligonucleotide
gccccgaccucagccccgacggucc

SEQ ID NO: 164794 - RNA, 25 nt, Artificial Sequence
  Description of Artificial Sequence: Synthetic oligonucleotide
cucggagcagugaggggccgcucuc

SEQ ID NO: 164795 - RNA, 25 nt, Artificial Sequence
  Description of Artificial Sequence: Synthetic oligonucleotide
ccuucccaguccuggucuccugcgc

SEQ ID NO: 164796 - RNA, 25 nt, Artificial Sequence
  Description of Artificial Sequence: Synthetic oligonucleotide
ccuaccagguggcccgaggcaugca

SEQ ID NO: 164797 - RNA, 25 nt, Artificial Sequence
  Description of Artificial Sequence: Synthetic oligonucleotide
aguaucuggagucccggaaguguau

SEQ ID NO: 164798 - RNA, 25 nt, Artificial Sequence
  Description of Artificial Sequence: Synthetic oligonucleotide
uccaccgggaccuggcugcccgcaa

SEQ ID NO: 164799 - RNA, 25 nt, Artificial Sequence
  Description of Artificial Sequence: Synthetic oligonucleotide
augugcuggugacugaggacaaugu

SEQ ID NO: 164800 - RNA, 25 nt, Artificial Sequence
  Description of Artificial Sequence: Synthetic oligonucleotide
ugaugaagauugcugacuuugggcu

SEQ ID NO: 164801 - RNA, 25 nt, Artificial Sequence
  Description of Artificial Sequence: Synthetic oligonucleotide
uggcccgcggcguccaccacauuga

SEQ ID NO: 164802 - RNA, 25 nt, Artificial Sequence
  Description of Artificial Sequence: Synthetic oligonucleotide
acuacuauaagaaaaccagcaacgg

SEQ ID NO: 164803 - RNA, 25 nt, Artificial Sequence
  Description of Artificial Sequence: Synthetic oligonucleotide
gccgccugccugugaaguggauggc

SEQ ID NO: 164804 - RNA, 25 nt, Artificial Sequence
  Description of Artificial Sequence: Synthetic oligonucleotide
cgcccgaggccuuguuugaccgggu

SEQ ID NO: 164805 - RNA, 25 nt, Artificial Sequence
  Description of Artificial Sequence: Synthetic oligonucleotide
uguacacacaccagagugacgugug

SEQ ID NO: 164806 - RNA, 25 nt, Artificial Sequence
  Description of Artificial Sequence: Synthetic oligonucleotide
ggucuuuugggauccugcuauggga

SEQ ID NO: 164807 - RNA, 25 nt, Artificial Sequence
  Description of Artificial Sequence: Synthetic oligonucleotide
agaucuucacccucgggggcucccc

SEQ ID NO: 164808 - RNA, 25 nt, Artificial Sequence
  Description of Artificial Sequence: Synthetic oligonucleotide
cguauccuggcaucccgguggagga

SEQ ID NO: 164809 - RNA, 25 nt, Artificial Sequence
  Description of Artificial Sequence: Synthetic oligonucleotide
agcuguucucgcugcugcgggaggg

SEQ ID NO: 164810 - RNA, 25 nt, Artificial Sequence
  Description of Artificial Sequence: Synthetic oligonucleotide
gacaucggauggaccgacccccaca

SEQ ID NO: 164811 - RNA, 25 nt, Artificial Sequence
  Description of Artificial Sequence: Synthetic oligonucleotide
acugccccccagagcuguacgggcu

SEQ ID NO: 164812 - RNA, 25 nt, Artificial Sequence
  Description of Artificial Sequence: Synthetic oligonucleotide
ugaugcgugagugcuggcacgcagc

SEQ ID NO: 164813 - RNA, 25 nt, Artificial Sequence
  Description of Artificial Sequence: Synthetic oligonucleotide
cgcccucccagaggccuaccuucaa

SEQ ID NO: 164814 - RNA, 25 nt, Artificial Sequence
  Description of Artificial Sequence: Synthetic oligonucleotide
agcagcugguggaggcgcuggacaa

SEQ ID NO: 164815 - RNA, 25 nt, Artificial Sequence
  Description of Artificial Sequence: Synthetic oligonucleotide
agguccugcuggccgucucugagga

SEQ ID NO: 164816 - RNA, 25 nt, Artificial Sequence
  Description of Artificial Sequence: Synthetic oligonucleotide
aguaccucgaccuccgccugaccuu

SEQ ID NO: 164817 - RNA, 25 nt, Artificial Sequence
  Description of Artificial Sequence: Synthetic oligonucleotide
ucggacccuauucccccucuggugg

SEQ ID NO: 164818 - RNA, 25 nt, Artificial Sequence
  Description of Artificial Sequence: Synthetic oligonucleotide
gggacgccagcagcaccugcuccuc

SEQ ID NO: 164819 - RNA, 25 nt, Artificial Sequence
  Description of Artificial Sequence: Synthetic oligonucleotide
ccagcgauucugucuucagccacga

SEQ ID NO: 164820 - RNA, 25 nt, Artificial Sequence
  Description of Artificial Sequence: Synthetic oligonucleotide
acccccugccauugggauccagcuc

SEQ ID NO: 164821 - RNA, 25 nt, Artificial Sequence
  Description of Artificial Sequence: Synthetic oligonucleotide
ccuuccccuucgggucuggggugca

SEQ ID NO: 164822 - RNA, 25 nt, Artificial Sequence
  Description of Artificial Sequence: Synthetic oligonucleotide
agacaugagcaaggcucaaggcugu

SEQ ID NO: 164823 - RNA, 25 nt, Artificial Sequence
  Description of Artificial Sequence: Synthetic oligonucleotide
ugcaggcacauaggcugguggccuu

SEQ ID NO: 164824 - RNA, 25 nt, Artificial Sequence
  Description of Artificial Sequence: Synthetic oligonucleotide
ugggccuuggggcucagccacagcc

SEQ ID NO: 164825 - RNA, 25 nt, Artificial Sequence
  Description of Artificial Sequence: Synthetic oligonucleotide
cugacacagugcucgaccuugauag

SEQ ID NO: 164826 - RNA, 25 nt, Artificial Sequence
  Description of Artificial Sequence: Synthetic oligonucleotide
gcauggggccccuggcccagaguug

SEQ ID NO: 164827 - RNA, 25 nt, Artificial Sequence
  Description of Artificial Sequence: Synthetic oligonucleotide
gcugugccguguccaagggccgugc

SEQ ID NO: 164828 - RNA, 25 nt, Artificial Sequence
  Description of Artificial Sequence: Synthetic oligonucleotide
cccuugcccuuggagcugccgugcc

SEQ ID NO: 164829 - RNA, 25 nt, Artificial Sequence
  Description of Artificial Sequence: Synthetic oligonucleotide
cuguguccugauggcccaaauguca

SEQ ID NO: 164830 - RNA, 25 nt, Artificial Sequence
  Description of Artificial Sequence: Synthetic oligonucleotide
aggguucugcucggcuucuuggacc

SEQ ID NO: 164831 - RNA, 25 nt, Artificial Sequence
  Description of Artificial Sequence: Synthetic oligonucleotide
cuuggcgcuuaguccccaucccggg

SEQ ID NO: 164832 - RNA, 25 nt, Artificial Sequence
  Description of Artificial Sequence: Synthetic oligonucleotide
guuuggcugagccuggcuggagagc

SEQ ID NO: 164833 - RNA, 25 nt, Artificial Sequence
  Description of Artificial Sequence: Synthetic oligonucleotide
cugcuaugcuaaaccuccugccucc

SEQ ID NO: 164834 - RNA, 25 nt, Artificial Sequence
  Description of Artificial Sequence: Synthetic oligonucleotide
ccaauaccagcaggagguucugggc

SEQ ID NO: 164835 - RNA, 25 nt, Artificial Sequence
  Description of Artificial Sequence: Synthetic oligonucleotide
ccucugaacccccuuuccccacacc

SEQ ID NO: 164836 - RNA, 25 nt, Artificial Sequence
  Description of Artificial Sequence: Synthetic oligonucleotide
cucccccugcugcugcugccccagc

SEQ ID NO: 164837 - RNA, 25 nt, Artificial Sequence
  Description of Artificial Sequence: Synthetic oligonucleotide
cgucuugacgggagcauuggccccu

SEQ ID NO: 164838 - RNA, 25 nt, Artificial Sequence
  Description of Artificial Sequence: Synthetic oligonucleotide
ugagcccagagaagcuggaagccug

SEQ ID NO: 164839 - RNA, 25 nt, Artificial Sequence
  Description of Artificial Sequence: Synthetic oligonucleotide
gccgaaaacaggagcaaauggcguu

SEQ ID NO: 164840 - RNA, 25 nt, Artificial Sequence
  Description of Artificial Sequence: Synthetic oligonucleotide
uuuauaaauuauuuuuuugaaauaa

SEQ ID NO: 164841 - RNA, 25 nt, Artificial Sequence
  Description of Artificial Sequence: Synthetic oligonucleotide
caggugaggaggagccaggugagca

SEQ ID NO: 164842 - RNA, 25 nt, Artificial Sequence
  Description of Artificial Sequence: Synthetic oligonucleotide
aggacccugugcugggcgcggaguc

SEQ ID NO: 164843 - RNA, 25 nt, Artificial Sequence
  Description of Artificial Sequence: Synthetic oligonucleotide
cacgcaggcucgaggaaggcaguug

SEQ ID NO: 164844 - RNA, 25 nt, Artificial Sequence
  Description of Artificial Sequence: Synthetic oligonucleotide
ggugggaaguccagcuugggucccu

SEQ ID NO: 164845 - RNA, 25 nt, Artificial Sequence
  Description of Artificial Sequence: Synthetic oligonucleotide
ugagagcugugagaaggagaugcgg

SEQ ID NO: 164846 - RNA, 25 nt, Artificial Sequence
  Description of Artificial Sequence: Synthetic oligonucleotide
gcugcugcuggcccuguuggggguc

SEQ ID NO: 164847 - RNA, 25 nt, Artificial Sequence
  Description of Artificial Sequence: Synthetic oligonucleotide
ccugcugagugugccugggccucca

SEQ ID NO: 164848 - RNA, 25 nt, Artificial Sequence
  Description of Artificial Sequence: Synthetic oligonucleotide
agucuugucccuggaggccucugag

SEQ ID NO: 164849 - RNA, 25 nt, Artificial Sequence
  Description of Artificial Sequence: Synthetic oligonucleotide
ggaaguggagcuugagcccugccug

SEQ ID NO: 164850 - RNA, 25 nt, Artificial Sequence
  Description of Artificial Sequence: Synthetic oligonucleotide
ggcucccagccuggagcagcaagag

SEQ ID NO: 164851 - RNA, 25 nt, Artificial Sequence
  Description of Artificial Sequence: Synthetic oligonucleotide
gcaggagcugacaguagcccuuggg

SEQ ID NO: 164852 - RNA, 25 nt, Artificial Sequence
  Description of Artificial Sequence: Synthetic oligonucleotide
gcagccugugcgucugugcuguggg

SEQ ID NO: 164853 - RNA, 25 nt, Artificial Sequence
  Description of Artificial Sequence: Synthetic oligonucleotide
gcgggcugagcgugguggccacugg

SEQ ID NO: 164854 - RNA, 25 nt, Artificial Sequence
  Description of Artificial Sequence: Synthetic oligonucleotide
guacaaggagggcagucgccuggca

SEQ ID NO: 164855 - RNA, 25 nt, Artificial Sequence
  Description of Artificial Sequence: Synthetic oligonucleotide
accugcuggccguguacggggcugg

SEQ ID NO: 164856 - RNA, 25 nt, Artificial Sequence
  Description of Artificial Sequence: Synthetic oligonucleotide
gaggggccgccuagagauugccagc

SEQ ID NO: 164857 - RNA, 25 nt, Artificial Sequence
  Description of Artificial Sequence: Synthetic oligonucleotide
cuuccuaccugaggaugcuggccgc

SEQ ID NO: 164858 - RNA, 25 nt, Artificial Sequence
  Description of Artificial Sequence: Synthetic oligonucleotide
cuaccucugccuggcacgaggcucc

SEQ ID NO: 164859 - RNA, 25 nt, Artificial Sequence
  Description of Artificial Sequence: Synthetic oligonucleotide
caugaucguccugcagaaucucacc

SEQ ID NO: 164860 - RNA, 25 nt, Artificial Sequence
  Description of Artificial Sequence: Synthetic oligonucleotide
cuugauuacaggugacuccuugacc

SEQ ID NO: 164861 - RNA, 25 nt, Artificial Sequence
  Description of Artificial Sequence: Synthetic oligonucleotide
cuccagcaacgaugaugaggacccc

SEQ ID NO: 164862 - RNA, 25 nt, Artificial Sequence
  Description of Artificial Sequence: Synthetic oligonucleotide
caagucccauagggaccccucgaau

SEQ ID NO: 164863 - RNA, 25 nt, Artificial Sequence
  Description of Artificial Sequence: Synthetic oligonucleotide
uaggcacaguuacccccagcaagca

SEQ ID NO: 164864 - RNA, 25 nt, Artificial Sequence
  Description of Artificial Sequence: Synthetic oligonucleotide
acccuacuggacacacccccagcgc

SEQ ID NO: 164865 - RNA, 25 nt, Artificial Sequence
  Description of Artificial Sequence: Synthetic oligonucleotide
cauggagaagaaacugcaugcagua

SEQ ID NO: 164866 - RNA, 25 nt, Artificial Sequence
  Description of Artificial Sequence: Synthetic oligonucleotide
accugcggggaacaccgucaaguuc

SEQ ID NO: 164867 - RNA, 25 nt, Artificial Sequence
  Description of Artificial Sequence: Synthetic oligonucleotide
ccgcuguccagcugcaggcaacccc

SEQ ID NO: 164868 - RNA, 25 nt, Artificial Sequence
  Description of Artificial Sequence: Synthetic oligonucleotide
cacgcccaccauccgcuggcuuaag

SEQ ID NO: 164869 - RNA, 25 nt, Artificial Sequence
  Description of Artificial Sequence: Synthetic oligonucleotide
ggauggacaggccuuucauggggag

SEQ ID NO: 164870 - RNA, 25 nt, Artificial Sequence
  Description of Artificial Sequence: Synthetic oligonucleotide
gaaccgcauuggaggcauucggcug

SEQ ID NO: 164871 - RNA, 25 nt, Artificial Sequence
  Description of Artificial Sequence: Synthetic oligonucleotide
gcgccaucagcacuggagucucgug

SEQ ID NO: 164872 - RNA, 25 nt, Artificial Sequence
  Description of Artificial Sequence: Synthetic oligonucleotide
gauggagagcguggugcccucggac

SEQ ID NO: 164873 - RNA, 25 nt, Artificial Sequence
  Description of Artificial Sequence: Synthetic oligonucleotide
ccgcggcacauacaccugccuggua

SEQ ID NO: 164874 - RNA, 25 nt, Artificial Sequence
  Description of Artificial Sequence: Synthetic oligonucleotide
agagaacgcugugggcagcauccgc

SEQ ID NO: 164875 - RNA, 25 nt, Artificial Sequence
  Description of Artificial Sequence: Synthetic oligonucleotide
cuauaacuaccugcuagaugugcug

SEQ ID NO: 164876 - RNA, 25 nt, Artificial Sequence
  Description of Artificial Sequence: Synthetic oligonucleotide
ggagcgguccccgcaccggcccauc

SEQ ID NO: 164877 - RNA, 25 nt, Artificial Sequence
  Description of Artificial Sequence: Synthetic oligonucleotide
ccugcaggccgggcucccggccaac

SEQ ID NO: 164878 - RNA, 25 nt, Artificial Sequence
  Description of Artificial Sequence: Synthetic oligonucleotide
caccacagccguggugggcagcgac

SEQ ID NO: 164879 - RNA, 25 nt, Artificial Sequence
  Description of Artificial Sequence: Synthetic oligonucleotide
cguggagcugcugugcaagguguac

SEQ ID NO: 164880 - RNA, 25 nt, Artificial Sequence
  Description of Artificial Sequence: Synthetic oligonucleotide
cagcgaugcccagccccacauccag

SEQ ID NO: 164881 - RNA, 25 nt, Artificial Sequence
  Description of Artificial Sequence: Synthetic oligonucleotide
guggcugaagcacaucgucaucaac

SEQ ID NO: 164882 - RNA, 25 nt, Artificial Sequence
  Description of Artificial Sequence: Synthetic oligonucleotide
cggcagcagcuucggagccgacggu

SEQ ID NO: 164883 - RNA, 25 nt, Artificial Sequence
  Description of Artificial Sequence: Synthetic oligonucleotide
uuuccccuaugugcaaguccuaaag

SEQ ID NO: 164884 - RNA, 25 nt, Artificial Sequence
  Description of Artificial Sequence: Synthetic oligonucleotide
gacugcagacaucaauagcucagag

SEQ ID NO: 164885 - RNA, 25 nt, Artificial Sequence
  Description of Artificial Sequence: Synthetic oligonucleotide
gguggagguccuguaccugcggaac

SEQ ID NO: 164886 - RNA, 25 nt, Artificial Sequence
  Description of Artificial Sequence: Synthetic oligonucleotide
cgugucagccgaggacgcaggcgag

SEQ ID NO: 164887 - RNA, 25 nt, Artificial Sequence
  Description of Artificial Sequence: Synthetic oligonucleotide
guacaccugccucgcaggcaauucc

SEQ ID NO: 164888 - RNA, 25 nt, Artificial Sequence
  Description of Artificial Sequence: Synthetic oligonucleotide
caucggccucuccuaccagucugcc

SEQ ID NO: 164889 - RNA, 25 nt, Artificial Sequence
  Description of Artificial Sequence: Synthetic oligonucleotide
cuggcucacggugcugccagaggag

SEQ ID NO: 164890 - RNA, 25 nt, Artificial Sequence
  Description of Artificial Sequence: Synthetic oligonucleotide
ggaccccacauggaccgcagcagcg

SEQ ID NO: 164891 - RNA, 25 nt, Artificial Sequence
  Description of Artificial Sequence: Synthetic oligonucleotide
gcccgaggccagguauacggacauc

SEQ ID NO: 164892 - RNA, 25 nt, Artificial Sequence
  Description of Artificial Sequence: Synthetic oligonucleotide
cauccuguacgcgucgggcucccug

SEQ ID NO: 164893 - RNA, 25 nt, Artificial Sequence
  Description of Artificial Sequence: Synthetic oligonucleotide
ggccuuggcugugcuccugcugcug

SEQ ID NO: 164894 - RNA, 25 nt, Artificial Sequence
  Description of Artificial Sequence: Synthetic oligonucleotide
ggccgggcuguaucgagggcaggcg

SEQ ID NO: 164895 - RNA, 25 nt, Artificial Sequence
  Description of Artificial Sequence: Synthetic oligonucleotide
gcuccacggccggcacccccgcccg

SEQ ID NO: 164896 - RNA, 25 nt, Artificial Sequence
  Description of Artificial Sequence: Synthetic oligonucleotide
gcccgccacugugcagaagcucucc

SEQ ID NO: 164897 - RNA, 25 nt, Artificial Sequence
  Description of Artificial Sequence: Synthetic oligonucleotide
ccgcuucccucuggcccgacaguuc

SEQ ID NO: 164898 - RNA, 25 nt, Artificial Sequence
  Description of Artificial Sequence: Synthetic oligonucleotide
cucccuggagucaggcucuuccggc

SEQ ID NO: 164899 - RNA, 25 nt, Artificial Sequence
  Description of Artificial Sequence: Synthetic oligonucleotide
caagucaagcucaucccugguacga

SEQ ID NO: 164900 - RNA, 25 nt, Artificial Sequence
  Description of Artificial Sequence: Synthetic oligonucleotide
aggcgugcgucucuccuccagcggc

SEQ ID NO: 164901 - RNA, 25 nt, Artificial Sequence
  Description of Artificial Sequence: Synthetic oligonucleotide
ccccgccuugcucgccggccucgug

SEQ ID NO: 164902 - RNA, 25 nt, Artificial Sequence
  Description of Artificial Sequence: Synthetic oligonucleotide
gagucuagaucuaccucucgaccca

SEQ ID NO: 164903 - RNA, 25 nt, Artificial Sequence
  Description of Artificial Sequence: Synthetic oligonucleotide
acuaugggaguucccccgggacagg

SEQ ID NO: 164904 - RNA, 25 nt, Artificial Sequence
  Description of Artificial Sequence: Synthetic oligonucleotide
gcuggugcuugggaagccccuaggc

SEQ ID NO: 164905 - RNA, 25 nt, Artificial Sequence
  Description of Artificial Sequence: Synthetic oligonucleotide
cgagggcugcuuuggccagguagua

SEQ ID NO: 164906 - RNA, 25 nt, Artificial Sequence
  Description of Artificial Sequence: Synthetic oligonucleotide
acgugcagaggccuuuggcauggac

SEQ ID NO: 164907 - RNA, 25 nt, Artificial Sequence
  Description of Artificial Sequence: Synthetic oligonucleotide
cccugcccggccugaccaagccagc

SEQ ID NO: 164908 - RNA, 25 nt, Artificial Sequence
  Description of Artificial Sequence: Synthetic oligonucleotide
cacuguggccgucaagaugcucaaa

SEQ ID NO: 164909 - RNA, 25 nt, Artificial Sequence
  Description of Artificial Sequence: Synthetic oligonucleotide
agacaacgccucugacaaggaccug

SEQ ID NO: 164910 - RNA, 25 nt, Artificial Sequence
  Description of Artificial Sequence: Synthetic oligonucleotide
ggccgaccuggucucggagauggag

SEQ ID NO: 164911 - RNA, 25 nt, Artificial Sequence
  Description of Artificial Sequence: Synthetic oligonucleotide
ggugaugaagcugaucggccgacac

SEQ ID NO: 164912 - RNA, 25 nt, Artificial Sequence
  Description of Artificial Sequence: Synthetic oligonucleotide
caagaacaucaucaaccugcuuggu

SEQ ID NO: 164913 - RNA, 25 nt, Artificial Sequence
  Description of Artificial Sequence: Synthetic oligonucleotide
ugucugcacccaggaagggccccug

SEQ ID NO: 164914 - RNA, 25 nt, Artificial Sequence
  Description of Artificial Sequence: Synthetic oligonucleotide
guacgugaucguggagugcgccgcc

SEQ ID NO: 164915 - RNA, 25 nt, Artificial Sequence
  Description of Artificial Sequence: Synthetic oligonucleotide
caagggaaaccugcgggaguuccug

SEQ ID NO: 164916 - RNA, 25 nt, Artificial Sequence
  Description of Artificial Sequence: Synthetic oligonucleotide
gcgggcccggcgccccccaggcccc

SEQ ID NO: 164917 - RNA, 25 nt, Artificial Sequence
  Description of Artificial Sequence: Synthetic oligonucleotide
cgaccucagccccgacgguccucgg

SEQ ID NO: 164918 - RNA, 25 nt, Artificial Sequence
  Description of Artificial Sequence: Synthetic oligonucleotide
gagcagugaggggccgcucuccuuc

SEQ ID NO: 164919 - RNA, 25 nt, Artificial Sequence
  Description of Artificial Sequence: Synthetic oligonucleotide
cccaguccuggucuccugcgccuac

SEQ ID NO: 164920 - RNA, 25 nt, Artificial Sequence
  Description of Artificial Sequence: Synthetic oligonucleotide
ccagguggcccgaggcaugcaguau

SEQ ID NO: 164921 - RNA, 25 nt, Artificial Sequence
  Description of Artificial Sequence: Synthetic oligonucleotide
ucuggagucccggaaguguauccac

SEQ ID NO: 164922 - RNA, 25 nt, Artificial Sequence
  Description of Artificial Sequence: Synthetic oligonucleotide
ccgggaccuggcugcccgcaaugug

SEQ ID NO: 164923 - RNA, 25 nt, Artificial Sequence
  Description of Artificial Sequence: Synthetic oligonucleotide
gcuggugacugaggacaaugugaug

SEQ ID NO: 164924 - RNA, 25 nt, Artificial Sequence
  Description of Artificial Sequence: Synthetic oligonucleotide
gaagauugcugacuuugggcuggcc

SEQ ID NO: 164925 - RNA, 25 nt, Artificial Sequence
  Description of Artificial Sequence: Synthetic oligonucleotide
ccgcggcguccaccacauugacuac

SEQ ID NO: 164926 - RNA, 25 nt, Artificial Sequence
  Description of Artificial Sequence: Synthetic oligonucleotide
cuauaagaaaaccagcaacggccgc

SEQ ID NO: 164927 - RNA, 25 nt, Artificial Sequence
  Description of Artificial Sequence: Synthetic oligonucleotide
ccugccugugaaguggauggcgccc

SEQ ID NO: 164928 - RNA, 25 nt, Artificial Sequence
  Description of Artificial Sequence: Synthetic oligonucleotide
cgaggccuuguuugaccggguguac

SEQ ID NO: 164929 - RNA, 25 nt, Artificial Sequence
  Description of Artificial Sequence: Synthetic oligonucleotide
cacacaccagagugacguguggucu

SEQ ID NO: 164930 - RNA, 25 nt, Artificial Sequence
  Description of Artificial Sequence: Synthetic oligonucleotide
uuuugggauccugcuaugggagauc

SEQ ID NO: 164931 - RNA, 25 nt, Artificial Sequence
  Description of Artificial Sequence: Synthetic oligonucleotide
cuucacccucgggggcuccccguau

SEQ ID NO: 164932 - RNA, 25 nt, Artificial Sequence
  Description of Artificial Sequence: Synthetic oligonucleotide
uccuggcaucccgguggaggagcug

SEQ ID NO: 164933 - RNA, 25 nt, Artificial Sequence
  Description of Artificial Sequence: Synthetic oligonucleotide
guucucgcugcugcgggagggacau

SEQ ID NO: 164934 - RNA, 25 nt, Artificial Sequence
  Description of Artificial Sequence: Synthetic oligonucleotide
ucggauggaccgacccccacacugc

SEQ ID NO: 164935 - RNA, 25 nt, Artificial Sequence
  Description of Artificial Sequence: Synthetic oligonucleotide
ccccccagagcuguacgggcugaug

SEQ ID NO: 164936 - RNA, 25 nt, Artificial Sequence
  Description of Artificial Sequence: Synthetic oligonucleotide
gcgugagugcuggcacgcagcgccc

SEQ ID NO: 164937 - RNA, 25 nt, Artificial Sequence
  Description of Artificial Sequence: Synthetic oligonucleotide
cucccagaggccuaccuucaagcag

SEQ ID NO: 164938 - RNA, 25 nt, Artificial Sequence
  Description of Artificial Sequence: Synthetic oligonucleotide
gcugguggaggcgcuggacaagguc

SEQ ID NO: 164939 - RNA, 25 nt, Artificial Sequence
  Description of Artificial Sequence: Synthetic oligonucleotide
ccugcuggccgucucugaggaguac

SEQ ID NO: 164940 - RNA, 25 nt, Artificial Sequence
  Description of Artificial Sequence: Synthetic oligonucleotide
ccucgaccuccgccugaccuucgga

SEQ ID NO: 164941 - RNA, 25 nt, Artificial Sequence
  Description of Artificial Sequence: Synthetic oligonucleotide
acccuauucccccucugguggggac

SEQ ID NO: 164942 - RNA, 25 nt, Artificial Sequence
  Description of Artificial Sequence: Synthetic oligonucleotide
cgccagcagcaccugcuccuccagc

SEQ ID NO: 164943 - RNA, 25 nt, Artificial Sequence
  Description of Artificial Sequence: Synthetic oligonucleotide
cgauucugucuucagccacgacccc

SEQ ID NO: 164944 - RNA, 25 nt, Artificial Sequence
  Description of Artificial Sequence: Synthetic oligonucleotide
ccugccauugggauccagcuccuuc

SEQ ID NO: 164945 - RNA, 25 nt, Artificial Sequence
  Description of Artificial Sequence: Synthetic oligonucleotide
ccccuucgggucuggggugcagaca

SEQ ID NO: 164946 - RNA, 25 nt, Artificial Sequence
  Description of Artificial Sequence: Synthetic oligonucleotide
augagcaaggcucaaggcugugcag

SEQ ID NO: 164947 - RNA, 25 nt, Artificial Sequence
  Description of Artificial Sequence: Synthetic oligonucleotide
ggcacauaggcugguggccuugggc

SEQ ID NO: 164948 - RNA, 25 nt, Artificial Sequence
  Description of Artificial Sequence: Synthetic oligonucleotide
ccuuggggcucagccacagccugac

SEQ ID NO: 164949 - RNA, 25 nt, Artificial Sequence
  Description of Artificial Sequence: Synthetic oligonucleotide
cacagugcucgaccuugauagcaug

SEQ ID NO: 164950 - RNA, 25 nt, Artificial Sequence
  Description of Artificial Sequence: Synthetic oligonucleotide
ggggccccuggcccagaguugcugu

SEQ ID NO: 164951 - RNA, 25 nt, Artificial Sequence
  Description of Artificial Sequence: Synthetic oligonucleotide
ugccguguccaagggccgugcccuu

SEQ ID NO: 164952 - RNA, 25 nt, Artificial Sequence
  Description of Artificial Sequence: Synthetic oligonucleotide
ugcccuuggagcugccgugccugug

SEQ ID NO: 164953 - RNA, 25 nt, Artificial Sequence
  Description of Artificial Sequence: Synthetic oligonucleotide
guccugauggcccaaaugucagggu

SEQ ID NO: 164954 - RNA, 25 nt, Artificial Sequence
  Description of Artificial Sequence: Synthetic oligonucleotide
uucugcucggcuucuuggaccuugg

SEQ ID NO: 164955 - RNA, 25 nt, Artificial Sequence
  Description of Artificial Sequence: Synthetic oligonucleotide
gcgcuuaguccccaucccggguuug

SEQ ID NO: 164956 - RNA, 25 nt, Artificial Sequence
  Description of Artificial Sequence: Synthetic oligonucleotide
ggcugagccuggcuggagagcugcu

SEQ ID NO: 164957 - RNA, 25 nt, Artificial Sequence
  Description of Artificial Sequence: Synthetic oligonucleotide
uaugcuaaaccuccugccucccaau

SEQ ID NO: 164958 - RNA, 25 nt, Artificial Sequence
  Description of Artificial Sequence: Synthetic oligonucleotide
uaccagcaggagguucugggccucu

SEQ ID NO: 164959 - RNA, 25 nt, Artificial Sequence
  Description of Artificial Sequence: Synthetic oligonucleotide
ugaacccccuuuccccacaccuccc

SEQ ID NO: 164960 - RNA, 25 nt, Artificial Sequence
  Description of Artificial Sequence: Synthetic oligonucleotide
cccugcugcugcugccccagcgucu

SEQ ID NO: 164961 - RNA, 25 nt, Artificial Sequence
  Description of Artificial Sequence: Synthetic oligonucleotide
uugacgggagcauuggccccugagc

SEQ ID NO: 164962 - RNA, 25 nt, Artificial Sequence
  Description of Artificial Sequence: Synthetic oligonucleotide
cccagagaagcuggaagccugccga

SEQ ID NO: 164963 - RNA, 25 nt, Artificial Sequence
  Description of Artificial Sequence: Synthetic oligonucleotide
aaaacaggagcaaauggcguuuuau

SEQ ID NO: 164964 - RNA, 25 nt, Artificial Sequence
  Description of Artificial Sequence: Synthetic oligonucleotide
uaaauuauuuuuuugaaauaaaaaa

SEQ ID NO: 164965 - RNA, 25 nt, Artificial Sequence
  Description of Artificial Sequence: Synthetic oligonucleotide
gaaggcaguuggugggaaguccagc

SEQ ID NO: 164966 - RNA, 25 nt, Artificial Sequence
  Description of Artificial Sequence: Synthetic oligonucleotide
cuugggucccugagagcugugagaa

SEQ ID NO: 164967 - RNA, 25 nt, Artificial Sequence
  Description of Artificial Sequence: Synthetic oligonucleotide
aggagaugcggcugcugcuggcccu

SEQ ID NO: 164968 - RNA, 25 nt, Artificial Sequence
  Description of Artificial Sequence: Synthetic oligonucleotide
uguuggggguccugcugagugugcc

SEQ ID NO: 164969 - RNA, 25 nt, Artificial Sequence
  Description of Artificial Sequence: Synthetic oligonucleotide
cugggccuccagucuugucccugga

SEQ ID NO: 164970 - RNA, 25 nt, Artificial Sequence
  Description of Artificial Sequence: Synthetic oligonucleotide
aggccucugaggaaguggagcuuga

SEQ ID NO: 164971 - RNA, 25 nt, Artificial Sequence
  Description of Artificial Sequence: Synthetic oligonucleotide
agcccugccuggcucccagccugga

SEQ ID NO: 164972 - RNA, 25 nt, Artificial Sequence
  Description of Artificial Sequence: Synthetic oligonucleotide
agcagcaagagcaggagcugacagu

SEQ ID NO: 164973 - RNA, 25 nt, Artificial Sequence
  Description of Artificial Sequence: Synthetic oligonucleotide
uagcccuugggcagccugugcgucu

SEQ ID NO: 164974 - RNA, 25 nt, Artificial Sequence
  Description of Artificial Sequence: Synthetic oligonucleotide
ugugcugugggcgggcugagcgugg

SEQ ID NO: 164975 - RNA, 25 nt, Artificial Sequence
  Description of Artificial Sequence: Synthetic oligonucleotide
guggccacugguacaaggagggcag

SEQ ID NO: 164976 - RNA, 25 nt, Artificial Sequence
  Description of Artificial Sequence: Synthetic oligonucleotide
gucgccuggcaccugcuggccgugu

SEQ ID NO: 164977 - RNA, 25 nt, Artificial Sequence
  Description of Artificial Sequence: Synthetic oligonucleotide
uacggggcuggaggggccgccuaga

SEQ ID NO: 164978 - RNA, 25 nt, Artificial Sequence
  Description of Artificial Sequence: Synthetic oligonucleotide
agauugccagcuuccuaccugagga

SEQ ID NO: 164979 - RNA, 25 nt, Artificial Sequence
  Description of Artificial Sequence: Synthetic oligonucleotide
augcuggccgcuaccucugccuggc

SEQ ID NO: 164980 - RNA, 25 nt, Artificial Sequence
  Description of Artificial Sequence: Synthetic oligonucleotide
cacgaggcuccaugaucguccugca

SEQ ID NO: 164981 - RNA, 25 nt, Artificial Sequence
  Description of Artificial Sequence: Synthetic oligonucleotide
agaaucucaccuugauuacagguga

SEQ ID NO: 164982 - RNA, 25 nt, Artificial Sequence
  Description of Artificial Sequence: Synthetic oligonucleotide
acuccuugaccuccagcaacgauga

SEQ ID NO: 164983 - RNA, 25 nt, Artificial Sequence
  Description of Artificial Sequence: Synthetic oligonucleotide
augaggaccccaagucccauaggga

SEQ ID NO: 164984 - RNA, 25 nt, Artificial Sequence
  Description of Artificial Sequence: Synthetic oligonucleotide
accccucgaauaggcacaguuaccc

SEQ ID NO: 164985 - RNA, 25 nt, Artificial Sequence
  Description of Artificial Sequence: Synthetic oligonucleotide
cccagcaagcacccuacuggacaca

SEQ ID NO: 164986 - RNA, 25 nt, Artificial Sequence
  Description of Artificial Sequence: Synthetic oligonucleotide
acccccagcgcauggagaagaaacu

SEQ ID NO: 164987 - RNA, 25 nt, Artificial Sequence
  Description of Artificial Sequence: Synthetic oligonucleotide
ugcaugcaguaccugcggggaacac

SEQ ID NO: 164988 - RNA, 25 nt, Artificial Sequence
  Description of Artificial Sequence: Synthetic oligonucleotide
ccgucaaguuccgcuguccagcugc

SEQ ID NO: 164989 - RNA, 25 nt, Artificial Sequence
  Description of Artificial Sequence: Synthetic oligonucleotide
caggcaaccccacgcccaccauccg

SEQ ID NO: 164990 - RNA, 25 nt, Artificial Sequence
  Description of Artificial Sequence: Synthetic oligonucleotide
gcuggcuuaaggauggacaggccuu

SEQ ID NO: 164991 - RNA, 25 nt, Artificial Sequence
  Description of Artificial Sequence: Synthetic oligonucleotide
uucauggggagaaccgcauuggagg

SEQ ID NO: 164992 - RNA, 25 nt, Artificial Sequence
  Description of Artificial Sequence: Synthetic oligonucleotide
gcauucggcugcgccaucagcacug

SEQ ID NO: 164993 - RNA, 25 nt, Artificial Sequence
  Description of Artificial Sequence: Synthetic oligonucleotide
ggagucucgugauggagagcguggu

SEQ ID NO: 164994 - RNA, 25 nt, Artificial Sequence
  Description of Artificial Sequence: Synthetic oligonucleotide
ugcccucggaccgcggcacauacac

SEQ ID NO: 164995 - RNA, 25 nt, Artificial Sequence
  Description of Artificial Sequence: Synthetic oligonucleotide
ccugccugguagagaacgcuguggg

SEQ ID NO: 164996 - RNA, 25 nt, Artificial Sequence
  Description of Artificial Sequence: Synthetic oligonucleotide
gcagcauccgcuauaacuaccugcu

SEQ ID NO: 164997 - RNA, 25 nt, Artificial Sequence
  Description of Artificial Sequence: Synthetic oligonucleotide
uagaugugcuggagcgguccccgca

SEQ ID NO: 164998 - RNA, 25 nt, Artificial Sequence
  Description of Artificial Sequence: Synthetic oligonucleotide
accggcccauccugcaggccgggcu

SEQ ID NO: 164999 - RNA, 25 nt, Artificial Sequence
  Description of Artificial Sequence: Synthetic oligonucleotide
ucccggccaacaccacagccguggu

SEQ ID NO: 165000 - RNA, 25 nt, Artificial Sequence
  Description of Artificial Sequence: Synthetic oligonucleotide
ugggcagcgacguggagcugcugug

SEQ ID NO: 165001 - RNA, 25 nt, Artificial Sequence
  Description of Artificial Sequence: Synthetic oligonucleotide
gcaagguguacagcgaugcccagcc

SEQ ID NO: 165002 - RNA, 25 nt, Artificial Sequence
  Description of Artificial Sequence: Synthetic oligonucleotide
cccacauccaguggcugaagcacau

SEQ ID NO: 165003 - RNA, 25 nt, Artificial Sequence
  Description of Artificial Sequence: Synthetic oligonucleotide
ucgucaucaacggcagcagcuucgg

SEQ ID NO: 165004 - RNA, 25 nt, Artificial Sequence
  Description of Artificial Sequence: Synthetic oligonucleotide
gagccgacgguuuccccuaugugca

SEQ ID NO: 165005 - RNA, 25 nt, Artificial Sequence
  Description of Artificial Sequence: Synthetic oligonucleotide
aaguccuaaagacugcagacaucaa

SEQ ID NO: 165006 - RNA, 25 nt, Artificial Sequence
  Description of Artificial Sequence: Synthetic oligonucleotide
auagcucagagguggagguccugua

SEQ ID NO: 165007 - RNA, 25 nt, Artificial Sequence
  Description of Artificial Sequence: Synthetic oligonucleotide
accugcggaacgugucagccgagga

SEQ ID NO: 165008 - RNA, 25 nt, Artificial Sequence
  Description of Artificial Sequence: Synthetic oligonucleotide
acgcaggcgaguacaccugccucgc

SEQ ID NO: 165009 - RNA, 25 nt, Artificial Sequence
  Description of Artificial Sequence: Synthetic oligonucleotide
caggcaauuccaucggccucuccua

SEQ ID NO: 165010 - RNA, 25 nt, Artificial Sequence
  Description of Artificial Sequence: Synthetic oligonucleotide
accagucugccuggcucacggugcu

SEQ ID NO: 165011 - RNA, 25 nt, Artificial Sequence
  Description of Artificial Sequence: Synthetic oligonucleotide
ugccagguacugggcgcauccccca

SEQ ID NO: 165012 - RNA, 25 nt, Artificial Sequence
  Description of Artificial Sequence: Synthetic oligonucleotide
accucacaugugacagccugacucc

SEQ ID NO: 165013 - RNA, 25 nt, Artificial Sequence
  Description of Artificial Sequence: Synthetic oligonucleotide
cagcaggcagaaccaagucucccac

SEQ ID NO: 165014 - RNA, 25 nt, Artificial Sequence
  Description of Artificial Sequence: Synthetic oligonucleotide
cuuugcaguucucccuggagucagg

SEQ ID NO: 165015 - RNA, 25 nt, Artificial Sequence
  Description of Artificial Sequence: Synthetic oligonucleotide
gcucuuccggcaagucaagcucauc

SEQ ID NO: 165016 - RNA, 25 nt, Artificial Sequence
  Description of Artificial Sequence: Synthetic oligonucleotide
cccugguacgaggcgugcgucucuc

SEQ ID NO: 165017 - RNA, 25 nt, Artificial Sequence
  Description of Artificial Sequence: Synthetic oligonucleotide
ccuccagcggccccgccuugcucgc

SEQ ID NO: 165018 - RNA, 25 nt, Artificial Sequence
  Description of Artificial Sequence: Synthetic oligonucleotide
ccggccucgugagucuagaucuacc

SEQ ID NO: 165019 - RNA, 25 nt, Artificial Sequence
  Description of Artificial Sequence: Synthetic oligonucleotide
cucucgacccacuaugggaguuccc

SEQ ID NO: 165020 - RNA, 25 nt, Artificial Sequence
  Description of Artificial Sequence: Synthetic oligonucleotide
cccgggacaggcuggugcuugggaa

SEQ ID NO: 165021 - RNA, 25 nt, Artificial Sequence
  Description of Artificial Sequence: Synthetic oligonucleotide
agccccuaggcgagggcugcuuugg

SEQ ID NO: 165022 - RNA, 25 nt, Artificial Sequence
  Description of Artificial Sequence: Synthetic oligonucleotide
gccagguaguacgugcagaggccuu

SEQ ID NO: 165023 - RNA, 25 nt, Artificial Sequence
  Description of Artificial Sequence: Synthetic oligonucleotide
uuggcauggacccugcccggccuga

SEQ ID NO: 165024 - RNA, 25 nt, Artificial Sequence
  Description of Artificial Sequence: Synthetic oligonucleotide
accaagccagcacuguggccgucaa

SEQ ID NO: 165025 - RNA, 25 nt, Artificial Sequence
  Description of Artificial Sequence: Synthetic oligonucleotide
agaugcucaaagacaacgccucuga

SEQ ID NO: 165026 - RNA, 25 nt, Artificial Sequence
  Description of Artificial Sequence: Synthetic oligonucleotide
acaaggaccuggccgaccuggucuc

SEQ ID NO: 165027 - RNA, 25 nt, Artificial Sequence
  Description of Artificial Sequence: Synthetic oligonucleotide
cggagauggaggugaugaagcugau

SEQ ID NO: 165028 - RNA, 25 nt, Artificial Sequence
  Description of Artificial Sequence: Synthetic oligonucleotide
ucggccgacacaagaacaucaucaa

SEQ ID NO: 165029 - RNA, 25 nt, Artificial Sequence
  Description of Artificial Sequence: Synthetic oligonucleotide
accugcuuggugucugcacccagga

SEQ ID NO: 165030 - RNA, 25 nt, Artificial Sequence
  Description of Artificial Sequence: Synthetic oligonucleotide
aagggccccuguacgugaucgugga

SEQ ID NO: 165031 - RNA, 25 nt, Artificial Sequence
  Description of Artificial Sequence: Synthetic oligonucleotide
agugcgccgccaagggaaaccugcg

SEQ ID NO: 165032 - RNA, 25 nt, Artificial Sequence
  Description of Artificial Sequence: Synthetic oligonucleotide
gggaguuccugcgggcccggcgccc

SEQ ID NO: 165033 - RNA, 25 nt, Artificial Sequence
  Description of Artificial Sequence: Synthetic oligonucleotide
ccccaggccccgaccucagccccga

SEQ ID NO: 165034 - RNA, 25 nt, Artificial Sequence
  Description of Artificial Sequence: Synthetic oligonucleotide
acgguccucggagcagugaggggcc

SEQ ID NO: 165035 - RNA, 25 nt, Artificial Sequence
  Description of Artificial Sequence: Synthetic oligonucleotide
cgcucuccuucccaguccuggucuc

SEQ ID NO: 165036 - RNA, 25 nt, Artificial Sequence
  Description of Artificial Sequence: Synthetic oligonucleotide
ccugcgccuaccagguggcccgagg

SEQ ID NO: 165037 - RNA, 25 nt, Artificial Sequence
  Description of Artificial Sequence: Synthetic oligonucleotide
gcaugcaguaucuggagucccggaa

SEQ ID NO: 165038 - RNA, 25 nt, Artificial Sequence
  Description of Artificial Sequence: Synthetic oligonucleotide
aguguauccaccgggaccuggcugc

SEQ ID NO: 165039 - RNA, 25 nt, Artificial Sequence
  Description of Artificial Sequence: Synthetic oligonucleotide
cccgcaaugugcuggugacugagga

SEQ ID NO: 165040 - RNA, 25 nt, Artificial Sequence
  Description of Artificial Sequence: Synthetic oligonucleotide
acaaugugaugaagauugcugacuu

SEQ ID NO: 165041 - RNA, 25 nt, Artificial Sequence
  Description of Artificial Sequence: Synthetic oligonucleotide
uugggcuggcccgcggcguccacca

SEQ ID NO: 165042 - RNA, 25 nt, Artificial Sequence
  Description of Artificial Sequence: Synthetic oligonucleotide
acauugacuacuauaagaaaaccag

SEQ ID NO: 165043 - RNA, 25 nt, Artificial Sequence
  Description of Artificial Sequence: Synthetic oligonucleotide
gcaacggccgccugccugugaagug

SEQ ID NO: 165044 - RNA, 25 nt, Artificial Sequence
  Description of Artificial Sequence: Synthetic oligonucleotide
ggauggcgcccgaggccuuguuuga

SEQ ID NO: 165045 - RNA, 25 nt, Artificial Sequence
  Description of Artificial Sequence: Synthetic oligonucleotide
accggguguacacacaccagaguga

SEQ ID NO: 165046 - RNA, 25 nt, Artificial Sequence
  Description of Artificial Sequence: Synthetic oligonucleotide
acguguggucuuuugggauccugcu

SEQ ID NO: 165047 - RNA, 25 nt, Artificial Sequence
  Description of Artificial Sequence: Synthetic oligonucleotide
uaugggagaucuucacccucggggg

SEQ ID NO: 165048 - RNA, 25 nt, Artificial Sequence
  Description of Artificial Sequence: Synthetic oligonucleotide
gcuccccguauccuggcaucccggu

SEQ ID NO: 165049 - RNA, 25 nt, Artificial Sequence
  Description of Artificial Sequence: Synthetic oligonucleotide
uggaggagcuguucucgcugcugcg

SEQ ID NO: 165050 - RNA, 25 nt, Artificial Sequence
  Description of Artificial Sequence: Synthetic oligonucleotide
gggagggacaucggauggaccgacc

SEQ ID NO: 165051 - RNA, 25 nt, Artificial Sequence
  Description of Artificial Sequence: Synthetic oligonucleotide
ccccacacugccccccagagcugua

SEQ ID NO: 165052 - RNA, 25 nt, Artificial Sequence
  Description of Artificial Sequence: Synthetic oligonucleotide
acgggcugaugcgugagugcuggca

SEQ ID NO: 165053 - RNA, 25 nt, Artificial Sequence
  Description of Artificial Sequence: Synthetic oligonucleotide
acgcagcgcccucccagaggccuac

SEQ ID NO: 165054 - RNA, 25 nt, Artificial Sequence
  Description of Artificial Sequence: Synthetic oligonucleotide
ccuucaagcagcugguggaggcgcu

SEQ ID NO: 165055 - RNA, 25 nt, Artificial Sequence
  Description of Artificial Sequence: Synthetic oligonucleotide
uggacaagguccugcuggccgucuc

SEQ ID NO: 165056 - RNA, 25 nt, Artificial Sequence
  Description of Artificial Sequence: Synthetic oligonucleotide
cugaggaguaccucgaccuccgccu

SEQ ID NO: 165057 - RNA, 25 nt, Artificial Sequence
  Description of Artificial Sequence: Synthetic oligonucleotide
ugaccuucggacccuauucccccuc

SEQ ID NO: 165058 - RNA, 25 nt, Artificial Sequence
  Description of Artificial Sequence: Synthetic oligonucleotide
cugguggggacgccagcagcaccug

SEQ ID NO: 165059 - RNA, 25 nt, Artificial Sequence
  Description of Artificial Sequence: Synthetic oligonucleotide
gcuccuccagcgauucugucuucag

SEQ ID NO: 165060 - RNA, 25 nt, Artificial Sequence
  Description of Artificial Sequence: Synthetic oligonucleotide
gccacgacccccugccauugggauc

SEQ ID NO: 165061 - RNA, 25 nt, Artificial Sequence
  Description of Artificial Sequence: Synthetic oligonucleotide
ccagcuccuuccccuucgggucugg

SEQ ID NO: 165062 - RNA, 25 nt, Artificial Sequence
  Description of Artificial Sequence: Synthetic oligonucleotide
gggugcagacaugagcaaggcucaa

SEQ ID NO: 165063 - RNA, 25 nt, Artificial Sequence
  Description of Artificial Sequence: Synthetic oligonucleotide
aggcugugcaggcacauaggcuggu

SEQ ID NO: 165064 - RNA, 25 nt, Artificial Sequence
  Description of Artificial Sequence: Synthetic oligonucleotide
uggccuugggccuuggggcucagcc

SEQ ID NO: 165065 - RNA, 25 nt, Artificial Sequence
  Description of Artificial Sequence: Synthetic oligonucleotide
cacagccugacacagugcucgaccu

SEQ ID NO: 165066 - RNA, 25 nt, Artificial Sequence
  Description of Artificial Sequence: Synthetic oligonucleotide
uugauagcauggggccccuggccca

SEQ ID NO: 165067 - RNA, 25 nt, Artificial Sequence
  Description of Artificial Sequence: Synthetic oligonucleotide
agaguugcugugccguguccaaggg

SEQ ID NO: 165068 - RNA, 25 nt, Artificial Sequence
  Description of Artificial Sequence: Synthetic oligonucleotide
gccgugcccuugcccuuggagcugc

SEQ ID NO: 165069 - RNA, 25 nt, Artificial Sequence
  Description of Artificial Sequence: Synthetic oligonucleotide
ccgugccuguguccugauggcccaa

SEQ ID NO: 165070 - RNA, 25 nt, Artificial Sequence
  Description of Artificial Sequence: Synthetic oligonucleotide
aaugucaggguucugcucggcuucu

SEQ ID NO: 165071 - RNA, 25 nt, Artificial Sequence
  Description of Artificial Sequence: Synthetic oligonucleotide
uuggaccuuggcgcuuaguccccau

SEQ ID NO: 165072 - RNA, 25 nt, Artificial Sequence
  Description of Artificial Sequence: Synthetic oligonucleotide
ucccggguuuggcugagccuggcug

SEQ ID NO: 165073 - RNA, 25 nt, Artificial Sequence
  Description of Artificial Sequence: Synthetic oligonucleotide
ggagagcugcuaugcuaaaccuccu

SEQ ID NO: 165074 - RNA, 25 nt, Artificial Sequence
  Description of Artificial Sequence: Synthetic oligonucleotide
ugccucccaauaccagcaggagguu

SEQ ID NO: 165075 - RNA, 25 nt, Artificial Sequence
  Description of Artificial Sequence: Synthetic oligonucleotide
ucugggccucugaacccccuuuccc

SEQ ID NO: 165076 - RNA, 25 nt, Artificial Sequence
  Description of Artificial Sequence: Synthetic oligonucleotide
ccacaccucccccugcugcugcugc

SEQ ID NO: 165077 - RNA, 25 nt, Artificial Sequence
  Description of Artificial Sequence: Synthetic oligonucleotide
ccccagcgucuugacgggagcauug

SEQ ID NO: 165078 - RNA, 25 nt, Artificial Sequence
  Description of Artificial Sequence: Synthetic oligonucleotide
ggccccugagcccagagaagcugga

SEQ ID NO: 165079 - RNA, 25 nt, Artificial Sequence
  Description of Artificial Sequence: Synthetic oligonucleotide
aagccugccgaaaacaggagcaaau

SEQ ID NO: 165080 - RNA, 25 nt, Artificial Sequence
  Description of Artificial Sequence: Synthetic oligonucleotide
uggcguuuuauaaauuauuuuuuug

SEQ ID NO: 165081 - DNA, 21 bp, Artificial Sequence
  Description of Artificial Sequence: Synthetic oligonucleotide
  Description of Combined DNA/RNA Molecule: Synthetic oligonucleotide
cuacacaaaucagcgauuutt

SEQ ID NO: 165082 - DNA, 21 bp, Artificial Sequence
  Description of Artificial Sequence: Synthetic oligonucleotide
  Description of Combined DNA/RNA Molecule: Synthetic oligonucleotide
aaaucgcugauuuguguagtt

SEQ ID NO: 165083 - DNA, 25 bp, Artificial Sequence
  Description of Artificial Sequence: Synthetic oligonucleotide
  Description of Combined DNA/RNA Molecule: Synthetic oligonucleotide
cuacacaaaucagcgauuuccaugt

SEQ ID NO: 165084 - RNA, 27 nt, Artificial Sequence
  Description of Artificial Sequence: Synthetic oligonucleotide
acauggaaaucgcugauuuguguaguc

SEQ ID NO: 165085 - RNA, 13 nt, Artificial Sequence
  Description of Artificial Sequence: Synthetic oligonucleotide
cuacacaaaucag

SEQ ID NO: 165086 - DNA, 11 bp, Artificial Sequence
  Description of Artificial Sequence: Synthetic oligonucleotide
  Description of Combined DNA/RNA Molecule: Synthetic oligonucleotide
gauuuccaugt

SEQ ID NO: 165087 - DNA, 21 bp, Artificial Sequence
  Description of Artificial Sequence: Synthetic oligonucleotide
  Description of Combined DNA/RNA Molecule: Synthetic oligonucleotide
ggaucuuauuucuucggagtt

SEQ ID NO: 165088 - DNA, 21 bp, Artificial Sequence
  Description of Artificial Sequence: Synthetic oligonucleotide
  Description of Combined DNA/RNA Molecule: Synthetic oligonucleotide
cuccgaagaaauaagaucctt

SEQ ID NO: 165089 - RNA, 11 nt, Artificial Sequence
  Description of Artificial Sequence: Synthetic oligonucleotide
ggaucuuauuu

SEQ ID NO: 165090 - DNA, 10 bp, Artificial Sequence
  Description of Artificial Sequence: Synthetic oligonucleotide
  Description of Combined DNA/RNA Molecule: Synthetic oligonucleotide
cuucggagtt

SEQ ID NO: 165091 - RNA, 27 nt, Artificial Sequence
  Description of Artificial Sequence: Synthetic oligonucleotide
cauugucuccgaagaaauaagauccuu

SEQ ID NO: 165092 - RNA, 8 nt, Artificial Sequence
  Description of Artificial Sequence: Synthetic oligonucleotide
  modified_base (2): LNA-G
ggaucuua

SEQ ID NO: 165093 - DNA, 17 bp, Artificial Sequence
  Description of Artificial Sequence: Synthetic oligonucleotide
  Description of Combined DNA/RNA Molecule: Synthetic oligonucleotide
uuucuucggagacaatg

SEQ ID NO: 165094 - DNA, 16 bp, Artificial Sequence
  Description of Artificial Sequence: Synthetic oligonucleotide
  Description of Combined DNA/RNA Molecule: Synthetic oligonucleotide
uucuucggagacaatg

SEQ ID NO: 165095 - DNA, 15 bp, Artificial Sequence
  Description of Artificial Sequence: Synthetic oligonucleotide
  Description of Combined DNA/RNA Molecule: Synthetic oligonucleotide
ucuucggagacaatg

SEQ ID NO: 165096 - DNA, 14 bp, Artificial Sequence
  Description of Artificial Sequence: Synthetic oligonucleotide
  Description of Combined DNA/RNA Molecule: Synthetic oligonucleotide
cuucggagacaatg

SEQ ID NO: 165097 - DNA, 13 bp, Artificial Sequence
  Description of Artificial Sequence: Synthetic oligonucleotide
  Description of Combined DNA/RNA Molecule: Synthetic oligonucleotide
uucggagacaatg

SEQ ID NO: 165098 - DNA, 12 bp, Artificial Sequence
  Description of Artificial Sequence: Synthetic oligonucleotide
  Description of Combined DNA/RNA Molecule: Synthetic oligonucleotide
ucggagacaatg

SEQ ID NO: 165099 - DNA, 11 bp, Artificial Sequence
  Description of Artificial Sequence: Synthetic oligonucleotide
  Description of Combined DNA/RNA Molecule: Synthetic oligonucleotide
cggagacaatg

SEQ ID NO: 165100 - RNA, 9 nt, Artificial Sequence
  Description of Artificial Sequence: Synthetic oligonucleotide
  modified_base (2): LNA-G
ggaucuuau

SEQ ID NO: 165101 - RNA, 10 nt, Artificial Sequence
  Description of Artificial Sequence: Synthetic oligonucleotide
  modified_base (2): LNA-G
ggaucuuauu

SEQ ID NO: 165102 - RNA, 11 nt, Artificial Sequence
  Description of Artificial Sequence: Synthetic oligonucleotide
  modified_base (2): LNA-G
ggaucuuauuu

SEQ ID NO: 165103 - RNA, 12 nt, Artificial Sequence
  Description of Artificial Sequence: Synthetic oligonucleotide
  modified_base (2): LNA-G
ggaucuuauuuc

SEQ ID NO: 165104 - RNA, 8 nt, Artificial Sequence
  Description of Artificial Sequence: Synthetic oligonucleotide
  modified_base (3): LNA-A
cuacacaa

SEQ ID NO: 165105 - DNA, 13 bp, Artificial Sequence
  Description of Artificial Sequence: Synthetic oligonucleotide
  Description of Combined DNA/RNA Molecule: Synthetic oligonucleotide
  modified_base (8): LNA-A
aucagcgauuutt

SEQ ID NO: 165106 - DNA, 12 bp, Artificial Sequence
  Description of Artificial Sequence: Synthetic oligonucleotide
  Description of Combined DNA/RNA Molecule: Synthetic oligonucleotide
  modified_base (7): LNA-A
ucagcgauuutt

SEQ ID NO: 165107 - DNA, 11 bp, Artificial Sequence
  Description of Artificial Sequence: Synthetic oligonucleotide
  Description of Combined DNA/RNA Molecule: Synthetic oligonucleotide
  modified_base (6): LNA-A
cagcgauuutt

SEQ ID NO: 165108 - DNA, 10 bp, Artificial Sequence
  Description of Artificial Sequence: Synthetic oligonucleotide
  Description of Combined DNA/RNA Molecule: Synthetic oligonucleotide
  modified_base (5): LNA-A
agcgauuutt

SEQ ID NO: 165109 - DNA, 9 bp, Artificial Sequence
  Description of Artificial Sequence: Synthetic oligonucleotide
  Description of Combined DNA/RNA Molecule: Synthetic oligonucleotide
  modified_base (4): LNA-A
gcgauuutt

SEQ ID NO: 165110 - DNA, 8 bp, Artificial Sequence
  Description of Artificial Sequence: Synthetic oligonucleotide
  Description of Combined DNA/RNA Molecule: Synthetic oligonucleotide
  modified_base (3): LNA-A
cgauuutt

SEQ ID NO: 165111 - DNA, 7 bp, Artificial Sequence
  Description of Artificial Sequence: Synthetic oligonucleotide
  Description of Combined DNA/RNA Molecule: Synthetic oligonucleotide
  modified_base (2): LNA-A
gauuutt

SEQ ID NO: 165112 - RNA, 9 nt, Artificial Sequence
  Description of Artificial Sequence: Synthetic oligonucleotide
  modified_base (3): LNA-A
cuacacaaa

SEQ ID NO: 165113 - RNA, 10 nt, Artificial Sequence
  Description of Artificial Sequence: Synthetic oligonucleotide
  modified_base (3): LNA-A
cuacacaaau

SEQ ID NO: 165114 - RNA, 11 nt, Artificial Sequence
  Description of Artificial Sequence: Synthetic oligonucleotide
  modified_base (3): LNA-A
cuacacaaauc

SEQ ID NO: 165115 - RNA, 12 nt, Artificial Sequence
  Description of Artificial Sequence: Synthetic oligonucleotide
  modified_base (3): LNA-A
cuacacaaauca

SEQ ID NO: 165116 - RNA, 13 nt, Artificial Sequence
  Description of Artificial Sequence: Synthetic oligonucleotide
  modified_base (3): LNA-A
cuacacaaaucag

SEQ ID NO: 165117 - RNA, 14 nt, Artificial Sequence
  Description of Artificial Sequence: Synthetic oligonucleotide
  modified_base (3): LNA-A
cuacacaaaucagc

SEQ ID NO: 165118 - RNA, 13 nt, Artificial Sequence
  Description of Artificial Sequence: Synthetic oligonucleotide
  modified_base (2): LNA-G
ggaucuuauuucu

SEQ ID NO: 165119 - RNA, 14 nt, Artificial Sequence
  Description of Artificial Sequence: Synthetic oligonucleotide
  modified_base (2): LNA-G
ggaucuuauuucuu

SEQ ID NO: 165120 - RNA, 8 nt, Artificial Sequence
  Description of Artificial Sequence: Synthetic oligonucleotide
  modified_base (2): LNA-G
  modified_base (8): LNA-A
ggaucuua

SEQ ID NO: 165121 - RNA, 9 nt, Artificial Sequence
  Description of Artificial Sequence: Synthetic oligonucleotide
  modified_base (2): LNA-G
  modified_base (9): LNA-U
ggaucuuau

SEQ ID NO: 165122 - RNA, 10 nt, Artificial Sequence
  Description of Artificial Sequence: Synthetic oligonucleotide
  modified_base (2): LNA-G
  modified_base (10): LNA-U
ggaucuuauu

SEQ ID NO: 165123 - RNA, 11 nt, Artificial Sequence
  Description of Artificial Sequence: Synthetic oligonucleotide
  modified_base (2): LNA-G
  modified_base (11): LNA-U
ggaucuuauuu

SEQ ID NO: 165124 - RNA, 12 nt, Artificial Sequence
  Description of Artificial Sequence: Synthetic oligonucleotide
  modified_base (2): LNA-G
  modified_base (12): LNA-C
ggaucuuauuuc

SEQ ID NO: 165125 - RNA, 13 nt, Artificial Sequence
  Description of Artificial Sequence: Synthetic oligonucleotide
  modified_base (2): LNA-G
  modified_base (13): LNA-U
ggaucuuauuucu

SEQ ID NO: 165126 - RNA, 14 nt, Artificial Sequence
  Description of Artificial Sequence: Synthetic oligonucleotide
  modified_base (2): LNA-G
  modified_base (14): LNA-U
ggaucuuauuucuu

SEQ ID NO: 165127 - DNA, 13 bp, Artificial Sequence
  Description of Artificial Sequence: Synthetic oligonucleotide
  Description of Combined DNA/RNA Molecule: Synthetic oligonucleotide
  modified_base (8): LNA-G
uuucuucggagtt

SEQ ID NO: 165128 - DNA, 12 bp, Artificial Sequence
  Description of Artificial Sequence: Synthetic oligonucleotide
  Description of Combined DNA/RNA Molecule: Synthetic oligonucleotide
  modified_base (7): LNA-G
uucuucggagtt

SEQ ID NO: 165129 - DNA, 11 bp, Artificial Sequence
  Description of Artificial Sequence: Synthetic oligonucleotide
  Description of Combined DNA/RNA Molecule: Synthetic oligonucleotide
  modified_base (6): LNA-G
ucuucggagtt

SEQ ID NO: 165130 - DNA, 10 bp, Artificial Sequence
  Description of Artificial Sequence: Synthetic oligonucleotide
  Description of Combined DNA/RNA Molecule: Synthetic oligonucleotide
  modified_base (5): LNA-G
cuucggagtt

SEQ ID NO: 165131 - DNA, 9 bp, Artificial Sequence
  Description of Artificial Sequence: Synthetic oligonucleotide
  Description of Combined DNA/RNA Molecule: Synthetic oligonucleotide
  modified_base (4): LNA-G
uucggagtt

SEQ ID NO: 165132 - DNA, 8 bp, Artificial Sequence
  Description of Artificial Sequence: Synthetic oligonucleotide
  Description of Combined DNA/RNA Molecule: Synthetic oligonucleotide
  modified_base (3): LNA-G
ucggagtt

SEQ ID NO: 165133 - DNA, 7 bp, Artificial Sequence
  Description of Artificial Sequence: Synthetic oligonucleotide
  Description of Combined DNA/RNA Molecule: Synthetic oligonucleotide
  modified_base (2): LNA-G
cggagtt

SEQ ID NO: 165134 - DNA, 13 bp, Artificial Sequence
  Description of Artificial Sequence: Synthetic oligonucleotide
  Description of Combined DNA/RNA Molecule: Synthetic oligonucleotide
  modified_base (1): LNA-U
  modified_base (8): LNA-G
uuucuucggagtt

SEQ ID NO: 165135 - DNA, 12 bp, Artificial Sequence
  Description of Artificial Sequence: Synthetic oligonucleotide
  Description of Combined DNA/RNA Molecule: Synthetic oligonucleotide
  modified_base (1): LNA-U
  modified_base (7): LNA-G
uucuucggagtt

SEQ ID NO: 165136 - DNA, 11 bp, Artificial Sequence
  Description of Artificial Sequence: Synthetic oligonucleotide
  Description of Combined DNA/RNA Molecule: Synthetic oligonucleotide
  modified_base (1): LNA-U
  modified_base (6): LNA-G
ucuucggagtt

SEQ ID NO: 165137 - DNA, 10 bp, Artificial Sequence
  Description of Artificial Sequence: Synthetic oligonucleotide
  Description of Combined DNA/RNA Molecule: Synthetic oligonucleotide
  modified_base (1): LNA-C
  modified_base (5): LNA-G
cuucggagtt

SEQ ID NO: 165138 - DNA, 9 bp, Artificial Sequence
  Description of Artificial Sequence: Synthetic oligonucleotide
  Description of Combined DNA/RNA Molecule: Synthetic oligonucleotide
  modified_base (1): LNA-U
  modified_base (4): LNA-G
uucggagtt

SEQ ID NO: 165139 - DNA, 8 bp, Artificial Sequence
  Description of Artificial Sequence: Synthetic oligonucleotide
  Description of Combined DNA/RNA Molecule: Synthetic oligonucleotide
  modified_base (1): LNA-U
  modified_base (3): LNA-G
ucggagtt

SEQ ID NO: 165140 - DNA, 7 bp, Artificial Sequence
  Description of Artificial Sequence: Synthetic oligonucleotide
  Description of Combined DNA/RNA Molecule: Synthetic oligonucleotide
  modified_base (1): LNA-C
  modified_base (2): LNA-G
cggagtt

SEQ ID NO: 165141 - DNA, 21 bp, Artificial Sequence
  Description of Artificial Sequence: Synthetic oligonucleotide
  Description of Combined DNA/RNA Molecule: Synthetic oligonucleotide
  modified_base (2): LNA-G
  modified_base (16): LNA-G
ggaucuuauuucuucggagtt

SEQ ID NO: 165142 - DNA, 25 bp, Artificial Sequence
  Description of Artificial Sequence: Synthetic oligonucleotide
  Description of Combined DNA/RNA Molecule: Synthetic oligonucleotide
ggaucuuauuucuucggagacaatg

SEQ ID NO: 165143 - RNA, 25 nt, Artificial Sequence
  Description of Artificial Sequence: Synthetic oligonucleotide
guauuuugaugaggaguucacggcc

SEQ ID NO: 165144 - RNA, 25 nt, Artificial Sequence
  Description of Artificial Sequence: Synthetic oligonucleotide
ggcccagaugaucaccaucacacca

SEQ ID NO: 165145 - RNA, 25 nt, Artificial Sequence
  Description of Artificial Sequence: Synthetic oligonucleotide
gggaagaaaacuauccugcggguuu

SEQ ID NO: 165146 - RNA, 25 nt, Artificial Sequence
  Description of Artificial Sequence: Synthetic oligonucleotide
guuuuaauuuauuucauccaguuug

SEQ ID NO: 165147 - RNA, 25 nt, Artificial Sequence
  Description of Artificial Sequence: Synthetic oligonucleotide
acguagggaaauguuaaggacuucu

SEQ ID NO: 165148 - RNA, 25 nt, Artificial Sequence
  Description of Artificial Sequence: Synthetic oligonucleotide
ccaggguuuacccagugggacagag

SEQ ID NO: 165149 - RNA, 25 nt, Artificial Sequence
  Description of Artificial Sequence: Synthetic oligonucleotide
agcaagguuuaaauuuguuauugug

SEQ ID NO: 165150 - RNA, 25 nt, Artificial Sequence
  Description of Artificial Sequence: Synthetic oligonucleotide
uguauuauguuguucaaaugcauuu

SEQ ID NO: 165151 - RNA, 25 nt, Artificial Sequence
  Description of Artificial Sequence: Synthetic oligonucleotide
uuuuaaucuuugugacaggaaagcc

SEQ ID NO: 165152 - RNA, 25 nt, Artificial Sequence
  Description of Artificial Sequence: Synthetic oligonucleotide
uuaaucuuugugacaggaaagcccu

SEQ ID NO: 165153 - RNA, 25 nt, Artificial Sequence
  Description of Artificial Sequence: Synthetic oligonucleotide
gcugcuuaugucucccagcauggcc

SEQ ID NO: 165154 - RNA, 25 nt, Artificial Sequence
  Description of Artificial Sequence: Synthetic oligonucleotide
aaguguuucagaagcuucucccuga

SEQ ID NO: 165155 - RNA, 25 nt, Artificial Sequence
  Description of Artificial Sequence: Synthetic oligonucleotide
gaccaucaauaaggaagaagcccuu

SEQ ID NO: 165156 - RNA, 25 nt, Artificial Sequence
  Description of Artificial Sequence: Synthetic oligonucleotide
ccaucaauaaggaagaagcccuuca

SEQ ID NO: 165157 - RNA, 25 nt, Artificial Sequence
  Description of Artificial Sequence: Synthetic oligonucleotide
ucaauaaggaagaagcccuucagcg

SEQ ID NO: 165158 - RNA, 25 nt, Artificial Sequence
  Description of Artificial Sequence: Synthetic oligonucleotide
aauaaggaagaagcccuucagcggc

SEQ ID NO: 165159 - RNA, 25 nt, Artificial Sequence
  Description of Artificial Sequence: Synthetic oligonucleotide
aggaagaagcccuucagcggccagu

SEQ ID NO: 165160 - RNA, 25 nt, Artificial Sequence
  Description of Artificial Sequence: Synthetic oligonucleotide
gcauaacuaaaggugaaaagcuccg

SEQ ID NO: 165161 - RNA, 25 nt, Artificial Sequence
  Description of Artificial Sequence: Synthetic oligonucleotide
cauaacuaaaggugaaaagcuccgg

SEQ ID NO: 165162 - RNA, 25 nt, Artificial Sequence
  Description of Artificial Sequence: Synthetic oligonucleotide
cuacaucacgccagucaacagucug

SEQ ID NO: 165163 - RNA, 25 nt, Artificial Sequence
  Description of Artificial Sequence: Synthetic oligonucleotide
acuggauuuaagcagaguucaaaag

SEQ ID NO: 165164 - RNA, 25 nt, Artificial Sequence
  Description of Artificial Sequence: Synthetic oligonucleotide
cuggauuuaagcagaguucaaaagc

SEQ ID NO: 165165 - RNA, 25 nt, Artificial Sequence
  Description of Artificial Sequence: Synthetic oligonucleotide
gauuuaagcagaguucaaaagcccu

SEQ ID NO: 165166 - RNA, 25 nt, Artificial Sequence
  Description of Artificial Sequence: Synthetic oligonucleotide
auuuaagcagaguucaaaagcccuu

SEQ ID NO: 165167 - RNA, 25 nt, Artificial Sequence
  Description of Artificial Sequence: Synthetic oligonucleotide
uuaagcagaguucaaaagcccuuca

SEQ ID NO: 165168 - RNA, 25 nt, Artificial Sequence
  Description of Artificial Sequence: Synthetic oligonucleotide
uaagcagaguucaaaagcccuucag

SEQ ID NO: 165169 - RNA, 25 nt, Artificial Sequence
  Description of Artificial Sequence: Synthetic oligonucleotide
agcagaguucaaaagcccuucagcg

SEQ ID NO: 165170 - RNA, 25 nt, Artificial Sequence
  Description of Artificial Sequence: Synthetic oligonucleotide
cucagggucugagugaagccgcucg

SEQ ID NO: 165171 - RNA, 25 nt, Artificial Sequence
  Description of Artificial Sequence: Synthetic oligonucleotide
caagcaacuacaucacgccagucaa

SEQ ID NO: 165172 - RNA, 25 nt, Artificial Sequence
  Description of Artificial Sequence: Synthetic oligonucleotide
aucaauggcagcuucuuggugcgug

SEQ ID NO: 165173 - RNA, 25 nt, Artificial Sequence
  Description of Artificial Sequence: Synthetic oligonucleotide
uuccagcccacauuggauucaucag

SEQ ID NO: 165174 - RNA, 25 nt, Artificial Sequence
  Description of Artificial Sequence: Synthetic oligonucleotide
cagcugagaauguggaauaccuaag

SEQ ID NO: 165175 - RNA, 25 nt, Artificial Sequence
  Description of Artificial Sequence: Synthetic oligonucleotide
aacguaucuccuaauuugaggcuca

SEQ ID NO: 165176 - RNA, 25 nt, Artificial Sequence
  Description of Artificial Sequence: Synthetic oligonucleotide
ccuaaaauaauuucucuacaauugg

SEQ ID NO: 165177 - RNA, 25 nt, Artificial Sequence
  Description of Artificial Sequence: Synthetic oligonucleotide
uggaagauucagcuaguuaggagcc

SEQ ID NO: 165178 - RNA, 25 nt, Artificial Sequence
  Description of Artificial Sequence: Synthetic oligonucleotide
uuaaacucuccuagucaauauccac

SEQ ID NO: 165179 - RNA, 25 nt, Artificial Sequence
  Description of Artificial Sequence: Synthetic oligonucleotide
cagccuacaguuauguucagucaca

SEQ ID NO: 165180 - RNA, 25 nt, Artificial Sequence
  Description of Artificial Sequence: Synthetic oligonucleotide
guuauguucagucacacacacauac

SEQ ID NO: 165181 - RNA, 25 nt, Artificial Sequence
  Description of Artificial Sequence: Synthetic oligonucleotide
cacauacaaaauguuccuuuugcuu

SEQ ID NO: 165182 - RNA, 25 nt, Artificial Sequence
  Description of Artificial Sequence: Synthetic oligonucleotide
uccuuuugcuuuuaaaguaauuuuu

SEQ ID NO: 165183 - RNA, 25 nt, Artificial Sequence
  Description of Artificial Sequence: Synthetic oligonucleotide
ugaccugugaagcaacagucaaugg

SEQ ID NO: 165184 - RNA, 25 nt, Artificial Sequence
  Description of Artificial Sequence: Synthetic oligonucleotide
cuaucucacacaucgacaaaccaau

SEQ ID NO: 165185 - RNA, 25 nt, Artificial Sequence
  Description of Artificial Sequence: Synthetic oligonucleotide
uguccucaauuguacugcuaccacu

SEQ ID NO: 165186 - RNA, 25 nt, Artificial Sequence
  Description of Artificial Sequence: Synthetic oligonucleotide
aaaccguagcuggcaagcggucuua

SEQ ID NO: 165187 - RNA, 25 nt, Artificial Sequence
  Description of Artificial Sequence: Synthetic oligonucleotide
uagcuggcaagcggucuuaccggcu

SEQ ID NO: 165188 - RNA, 25 nt, Artificial Sequence
  Description of Artificial Sequence: Synthetic oligonucleotide
uuguaugguuaaaagauggguuacc

SEQ ID NO: 165189 - RNA, 25 nt, Artificial Sequence
  Description of Artificial Sequence: Synthetic oligonucleotide
ugguuaaaagauggguuaccugcga

SEQ ID NO: 165190 - RNA, 25 nt, Artificial Sequence
  Description of Artificial Sequence: Synthetic oligonucleotide
cagggaauuauacaaucuugcugag

SEQ ID NO: 165191 - RNA, 25 nt, Artificial Sequence
  Description of Artificial Sequence: Synthetic oligonucleotide
acaaucuugcugagcauaaaacagu

SEQ ID NO: 165192 - RNA, 25 nt, Artificial Sequence
  Description of Artificial Sequence: Synthetic oligonucleotide
ccaauaaugaagaguccuuuauccu

SEQ ID NO: 165193 - RNA, 25 nt, Artificial Sequence
  Description of Artificial Sequence: Synthetic oligonucleotide
acuuuggauguuccaacgcaaguug

SEQ ID NO: 165194 - RNA, 25 nt, Artificial Sequence
  Description of Artificial Sequence: Synthetic oligonucleotide
aaugcuuccacuaaacugaaaccau

SEQ ID NO: 165195 - RNA, 25 nt, Artificial Sequence
  Description of Artificial Sequence: Synthetic oligonucleotide
gagaaaguuugacuuuguuaaauau

SEQ ID NO: 165196 - RNA, 25 nt, Artificial Sequence
  Description of Artificial Sequence: Synthetic oligonucleotide
aaagaacuacuguauauuaaaaguu

SEQ ID NO: 165197 - RNA, 25 nt, Artificial Sequence
  Description of Artificial Sequence: Synthetic oligonucleotide
uuagaaauacggguuuugacuuaac

SEQ ID NO: 165198 - RNA, 25 nt, Artificial Sequence
  Description of Artificial Sequence: Synthetic oligonucleotide
aacauggguacagcaaacucagcac

SEQ ID NO: 165199 - RNA, 25 nt, Artificial Sequence
  Description of Artificial Sequence: Synthetic oligonucleotide
aaagacacagaagaugcugaccuca

SEQ ID NO: 165200 - RNA, 25 nt, Artificial Sequence
  Description of Artificial Sequence: Synthetic oligonucleotide
uaguagggagguuuauucagaucgc

SEQ ID NO: 165201 - RNA, 25 nt, Artificial Sequence
  Description of Artificial Sequence: Synthetic oligonucleotide
gccuucugcagcaggguucugggau

SEQ ID NO: 165202 - RNA, 25 nt, Artificial Sequence
  Description of Artificial Sequence: Synthetic oligonucleotide
ggucugguacauauuggaaauuaug

SEQ ID NO: 165203 - RNA, 25 nt, Artificial Sequence
  Description of Artificial Sequence: Synthetic oligonucleotide
cuaguccuuccgauggaagcacuag

SEQ ID NO: 165204 - RNA, 25 nt, Artificial Sequence
  Description of Artificial Sequence: Synthetic oligonucleotide
ccagugaauauuguuuuuaugugga

SEQ ID NO: 165205 - RNA, 25 nt, Artificial Sequence
  Description of Artificial Sequence: Synthetic oligonucleotide
augaauucaaguuggaauugguaga

SEQ ID NO: 165206 - RNA, 25 nt, Artificial Sequence
  Description of Artificial Sequence: Synthetic oligonucleotide
caggacacagauuuagacuuggaga

SEQ ID NO: 165207 - RNA, 25 nt, Artificial Sequence
  Description of Artificial Sequence: Synthetic oligonucleotide
cucaaagcacaguuacaguauucca

SEQ ID NO: 165208 - RNA, 25 nt, Artificial Sequence
  Description of Artificial Sequence: Synthetic oligonucleotide
accacugccaccacugaugaauuaa

SEQ ID NO: 165209 - RNA, 25 nt, Artificial Sequence
  Description of Artificial Sequence: Synthetic oligonucleotide
gaaacuacuagugccacaucaucac

SEQ ID NO: 165210 - RNA, 25 nt, Artificial Sequence
  Description of Artificial Sequence: Synthetic oligonucleotide
aagucggacagccucaccaaacaga

SEQ ID NO: 165211 - RNA, 25 nt, Artificial Sequence
  Description of Artificial Sequence: Synthetic oligonucleotide
gaaagcgaaaaauggaacaugaugg

SEQ ID NO: 165212 - RNA, 25 nt, Artificial Sequence
  Description of Artificial Sequence: Synthetic oligonucleotide
cccucugauuuagcauguagacugc

SEQ ID NO: 165213 - RNA, 25 nt, Artificial Sequence
  Description of Artificial Sequence: Synthetic oligonucleotide
ugagcuauuuaaggaucuauuuaug

SEQ ID NO: 165214 - RNA, 25 nt, Artificial Sequence
  Description of Artificial Sequence: Synthetic oligonucleotide
aaaaggugaaaaagcacuauuauca

SEQ ID NO: 165215 - RNA, 25 nt, Artificial Sequence
  Description of Artificial Sequence: Synthetic oligonucleotide
gaaaaagcacuauuaucaguucugc

SEQ ID NO: 165216 - RNA, 25 nt, Artificial Sequence
  Description of Artificial Sequence: Synthetic oligonucleotide
ggcugaaaagaaagauuaaaccuac

SEQ ID NO: 165217 - RNA, 25 nt, Artificial Sequence
  Description of Artificial Sequence: Synthetic oligonucleotide
uaaacccuuauaauaaaauccuucu

SEQ ID NO: 165218 - RNA, 25 nt, Artificial Sequence
  Description of Artificial Sequence: Synthetic oligonucleotide
cauacuauuagccaaugcuguagac

SEQ ID NO: 165219 - RNA, 25 nt, Artificial Sequence
  Description of Artificial Sequence: Synthetic oligonucleotide
gacagaagcauuuugauaggaauag

SEQ ID NO: 165220 - RNA, 25 nt, Artificial Sequence
  Description of Artificial Sequence: Synthetic oligonucleotide
agagcaaauaagauaauggcccuga

SEQ ID NO: 165221 - RNA, 25 nt, Artificial Sequence
  Description of Artificial Sequence: Synthetic oligonucleotide
ccaacauuuuucucuuccucaagca

SEQ ID NO: 165222 - RNA, 25 nt, Artificial Sequence
  Description of Artificial Sequence: Synthetic oligonucleotide
uuaaguaugagaaaaguucagccca

SEQ ID NO: 165223 - RNA, 25 nt, Artificial Sequence
  Description of Artificial Sequence: Synthetic oligonucleotide
caggaauaaagauggcugcugaacc

SEQ ID NO: 165224 - RNA, 25 nt, Artificial Sequence
  Description of Artificial Sequence: Synthetic oligonucleotide
aauuugaaugaccaaguucucuuca

SEQ ID NO: 165225 - RNA, 25 nt, Artificial Sequence
  Description of Artificial Sequence: Synthetic oligonucleotide
auguauaaagauagccagccuagag

SEQ ID NO: 165226 - RNA, 25 nt, Artificial Sequence
  Description of Artificial Sequence: Synthetic oligonucleotide
ggcuguaacuaucucugugaagugu

SEQ ID NO: 165227 - RNA, 25 nt, Artificial Sequence
  Description of Artificial Sequence: Synthetic oligonucleotide
ucugugaagugugagaaaauuucaa

SEQ ID NO: 165228 - RNA, 25 nt, Artificial Sequence
  Description of Artificial Sequence: Synthetic oligonucleotide
ccuuuaaggaaaugaauccuccuga

SEQ ID NO: 165229 - RNA, 25 nt, Artificial Sequence
  Description of Artificial Sequence: Synthetic oligonucleotide
aaggauacaaaaagugacaucauau

SEQ ID NO: 165230 - RNA, 25 nt, Artificial Sequence
  Description of Artificial Sequence: Synthetic oligonucleotide
agaugcaauuugaaucuucaucaua

SEQ ID NO: 165231 - RNA, 25 nt, Artificial Sequence
  Description of Artificial Sequence: Synthetic oligonucleotide
guucaaaacgaagacuagcuauuaa

SEQ ID NO: 165232 - RNA, 25 nt, Artificial Sequence
  Description of Artificial Sequence: Synthetic oligonucleotide
gugaaaccucaucucuacuaaaaau

SEQ ID NO: 165233 - RNA, 25 nt, Artificial Sequence
  Description of Artificial Sequence: Synthetic oligonucleotide
acgaaagagaagcucuaucucgccu

SEQ ID NO: 165234 - RNA, 25 nt, Artificial Sequence
  Description of Artificial Sequence: Synthetic oligonucleotide
cuccacaagcgccuucgguccaguu

SEQ ID NO: 165235 - RNA, 25 nt, Artificial Sequence
  Description of Artificial Sequence: Synthetic oligonucleotide
gagaagauuccaaagauguagccgc

SEQ ID NO: 165236 - RNA, 25 nt, Artificial Sequence
  Description of Artificial Sequence: Synthetic oligonucleotide
aaucuggauucaaugaggagacuug

SEQ ID NO: 165237 - RNA, 25 nt, Artificial Sequence
  Description of Artificial Sequence: Synthetic oligonucleotide
agaacagauuugagaguagugagga

SEQ ID NO: 165238 - RNA, 25 nt, Artificial Sequence
  Description of Artificial Sequence: Synthetic oligonucleotide
ccagagcugugcagaugaguacaaa

SEQ ID NO: 165239 - RNA, 25 nt, Artificial Sequence
  Description of Artificial Sequence: Synthetic oligonucleotide
ccucagauuguuguuguuaaugggc

SEQ ID NO: 165240 - RNA, 25 nt, Artificial Sequence
  Description of Artificial Sequence: Synthetic oligonucleotide
cuauuuuaauuauuuuuaauuuauu

SEQ ID NO: 165241 - RNA, 25 nt, Artificial Sequence
  Description of Artificial Sequence: Synthetic oligonucleotide
uuuaauuuauuaauauuuaaauaug

SEQ ID NO: 165242 - RNA, 25 nt, Artificial Sequence
  Description of Artificial Sequence: Synthetic oligonucleotide
augcaguuugaauauccuuuguuuc

SEQ ID NO: 165243 - RNA, 25 nt, Artificial Sequence
  Description of Artificial Sequence: Synthetic oligonucleotide
caugcugcuggcgucuaaguguuug

SEQ ID NO: 165244 - RNA, 25 nt, Artificial Sequence
  Description of Artificial Sequence: Synthetic oligonucleotide
agaugugcauuucaccugugacaaa

SEQ ID NO: 165245 - RNA, 25 nt, Artificial Sequence
  Description of Artificial Sequence: Synthetic oligonucleotide
ucaaaaccugugccaggcugaauua

SEQ ID NO: 165246 - RNA, 25 nt, Artificial Sequence
  Description of Artificial Sequence: Synthetic oligonucleotide
gaauguggguagucauucuuacaau

SEQ ID NO: 165247 - RNA, 25 nt, Artificial Sequence
  Description of Artificial Sequence: Synthetic oligonucleotide
auguggguagucauucuuacaauug

SEQ ID NO: 165248 - RNA, 25 nt, Artificial Sequence
  Description of Artificial Sequence: Synthetic oligonucleotide
ugaaaaugagcaucagagaguguac

SEQ ID NO: 165249 - RNA, 25 nt, Artificial Sequence
  Description of Artificial Sequence: Synthetic oligonucleotide
uugcuuuucauguagaacucagcag

SEQ ID NO: 165250 - RNA, 25 nt, Artificial Sequence
  Description of Artificial Sequence: Synthetic oligonucleotide
uguauuucuauauuuauuuucagua

SEQ ID NO: 165251 - RNA, 25 nt, Artificial Sequence
  Description of Artificial Sequence: Synthetic oligonucleotide
uuugauuaauguuucuuaaauggaa

SEQ ID NO: 165252 - RNA, 25 nt, Artificial Sequence
  Description of Artificial Sequence: Synthetic oligonucleotide
caacguguauagugccuaaaauugu

SEQ ID NO: 165253 - RNA, 25 nt, Artificial Sequence
  Description of Artificial Sequence: Synthetic oligonucleotide
cauauccuuggcuacuaacaucugg

SEQ ID NO: 165254 - RNA, 25 nt, Artificial Sequence
  Description of Artificial Sequence: Synthetic oligonucleotide
uacuaacaucuggagacugugagcu

SEQ ID NO: 165255 - RNA, 25 nt, Artificial Sequence
  Description of Artificial Sequence: Synthetic oligonucleotide
cauaaguugugugcuuuuuauuaau

SEQ ID NO: 165256 - RNA, 25 nt, Artificial Sequence
  Description of Artificial Sequence: Synthetic oligonucleotide
gcaucauuuuggcucuucuuacauu

SEQ ID NO: 165257 - RNA, 25 nt, Artificial Sequence
  Description of Artificial Sequence: Synthetic oligonucleotide
gcucuucuuacauuuguaaaaaugu

SEQ ID NO: 165258 - RNA, 25 nt, Artificial Sequence
  Description of Artificial Sequence: Synthetic oligonucleotide
agauuaggucaucuuaauucauauu

SEQ ID NO: 165259 - RNA, 25 nt, Artificial Sequence
  Description of Artificial Sequence: Synthetic oligonucleotide
auggaauugaaagaacuaaucauga

SEQ ID NO: 165260 - RNA, 25 nt, Artificial Sequence
  Description of Artificial Sequence: Synthetic oligonucleotide
cacacucauuccuucugcucuuggg

SEQ ID NO: 165261 - RNA, 25 nt, Artificial Sequence
  Description of Artificial Sequence: Synthetic oligonucleotide
uguagagguaaccaguagcuuugag

SEQ ID NO: 165262 - RNA, 25 nt, Artificial Sequence
  Description of Artificial Sequence: Synthetic oligonucleotide
caaccacaugccacguaauauuuca

SEQ ID NO: 165263 - RNA, 25 nt, Artificial Sequence
  Description of Artificial Sequence: Synthetic oligonucleotide
ucggaaacaaguuauucucuucacu

SEQ ID NO: 165264 - RNA, 25 nt, Artificial Sequence
  Description of Artificial Sequence: Synthetic oligonucleotide
acucccaauaacuaaugcuaagaaa

SEQ ID NO: 165265 - RNA, 25 nt, Artificial Sequence
  Description of Artificial Sequence: Synthetic oligonucleotide
aaugcuaagaaaugcugaaaaucaa

SEQ ID NO: 165266 - RNA, 25 nt, Artificial Sequence
  Description of Artificial Sequence: Synthetic oligonucleotide
gucuuucucuaaauaugauuacuuu

SEQ ID NO: 165267 - RNA, 25 nt, Artificial Sequence
  Description of Artificial Sequence: Synthetic oligonucleotide
ugaauuucaggcauuuuguucuaca

SEQ ID NO: 165268 - RNA, 25 nt, Artificial Sequence
  Description of Artificial Sequence: Synthetic oligonucleotide
cgauucccucucacccgggacucuc

SEQ ID NO: 165269 - RNA, 25 nt, Artificial Sequence
  Description of Artificial Sequence: Synthetic oligonucleotide
aggaaagugaaccuuuaaaguaaag

SEQ ID NO: 165270 - RNA, 25 nt, Artificial Sequence
  Description of Artificial Sequence: Synthetic oligonucleotide
gaggcugcaugcucuggaagccugg

SEQ ID NO: 165271 - RNA, 25 nt, Artificial Sequence
  Description of Artificial Sequence: Synthetic oligonucleotide
ucucugaacagaaaacaaaagagag

SEQ ID NO: 165272 - RNA, 25 nt, Artificial Sequence
  Description of Artificial Sequence: Synthetic oligonucleotide
aacuuggcuguaaucaguuaugccg

SEQ ID NO: 165273 - RNA, 25 nt, Artificial Sequence
  Description of Artificial Sequence: Synthetic oligonucleotide
agaagccaaaauuaaaagaagucca

SEQ ID NO: 165274 - RNA, 25 nt, Artificial Sequence
  Description of Artificial Sequence: Synthetic oligonucleotide
auuaaaagaaguccaggugagguua

SEQ ID NO: 165275 - RNA, 25 nt, Artificial Sequence
  Description of Artificial Sequence: Synthetic oligonucleotide
gaauccggauuaucgggaagaggac

SEQ ID NO: 165276 - RNA, 25 nt, Artificial Sequence
  Description of Artificial Sequence: Synthetic oligonucleotide
aaugugacaucaaagcaaguauugu

SEQ ID NO: 165277 - RNA, 25 nt, Artificial Sequence
  Description of Artificial Sequence: Synthetic oligonucleotide
caucaaagcaaguauuguagcacuc

SEQ ID NO: 165278 - RNA, 25 nt, Artificial Sequence
  Description of Artificial Sequence: Synthetic oligonucleotide
agagagagaaaacaaaaccacaaau

SEQ ID NO: 165279 - RNA, 25 nt, Artificial Sequence
  Description of Artificial Sequence: Synthetic oligonucleotide
ucgcuguaguauuuaagcccauaca

SEQ ID NO: 165280 - RNA, 25 nt, Artificial Sequence
  Description of Artificial Sequence: Synthetic oligonucleotide
cgcuguaguauuuaagcccauacag

SEQ ID NO: 165281 - RNA, 25 nt, Artificial Sequence
  Description of Artificial Sequence: Synthetic oligonucleotide
auuuaagcccauacagaaaccuucc

SEQ ID NO: 165282 - RNA, 25 nt, Artificial Sequence
  Description of Artificial Sequence: Synthetic oligonucleotide
auuaaaauaaacaugguauaccuac

SEQ ID NO: 165283 - RNA, 25 nt, Artificial Sequence
  Description of Artificial Sequence: Synthetic oligonucleotide
cuguucugaucggccaguuuucgga

SEQ ID NO: 165284 - RNA, 25 nt, Artificial Sequence
  Description of Artificial Sequence: Synthetic oligonucleotide
aaauaauuugaacuuuggaacaggg

SEQ ID NO: 165285 - RNA, 25 nt, Artificial Sequence
  Description of Artificial Sequence: Synthetic oligonucleotide
ugcgaccuuaauuuaacuuuccagu

SEQ ID NO: 165286 - RNA, 25 nt, Artificial Sequence
  Description of Artificial Sequence: Synthetic oligonucleotide
cugagaaagcuaaaguuugguuuug

SEQ ID NO: 165287 - RNA, 25 nt, Artificial Sequence
  Description of Artificial Sequence: Synthetic oligonucleotide
aguaaagaugcuacuucccacugua

SEQ ID NO: 165288 - RNA, 25 nt, Artificial Sequence
  Description of Artificial Sequence: Synthetic oligonucleotide
cugcuuaauugcugauaccauauga

SEQ ID NO: 165289 - RNA, 25 nt, Artificial Sequence
  Description of Artificial Sequence: Synthetic oligonucleotide
uaccauaugaaugaaacaugggcug

SEQ ID NO: 165290 - RNA, 25 nt, Artificial Sequence
  Description of Artificial Sequence: Synthetic oligonucleotide
aacuuucuuauccaacuuuuucaua

SEQ ID NO: 165291 - RNA, 25 nt, Artificial Sequence
  Description of Artificial Sequence: Synthetic oligonucleotide
ccuugcaugacaucaugaggccgga

SEQ ID NO: 165292 - RNA, 25 nt, Artificial Sequence
  Description of Artificial Sequence: Synthetic oligonucleotide
ugaauuuguauaugacugcauuugu

SEQ ID NO: 165293 - RNA, 25 nt, Artificial Sequence
  Description of Artificial Sequence: Synthetic oligonucleotide
gaauccuaguagaauguuuacuacc

SEQ ID NO: 165294 - RNA, 25 nt, Artificial Sequence
  Description of Artificial Sequence: Synthetic oligonucleotide
gaaagggaagaauuuuuugaugaaa

SEQ ID NO: 165295 - RNA, 25 nt, Artificial Sequence
  Description of Artificial Sequence: Synthetic oligonucleotide
uaucggcaugccagugugugaauuu

SEQ ID NO: 165296 - RNA, 25 nt, Artificial Sequence
  Description of Artificial Sequence: Synthetic oligonucleotide
caccucauaguagagcaauguaugu

SEQ ID NO: 165297 - RNA, 25 nt, Artificial Sequence
  Description of Artificial Sequence: Synthetic oligonucleotide
ccagaauugccaaagcacauauaua

SEQ ID NO: 165298 - RNA, 25 nt, Artificial Sequence
  Description of Artificial Sequence: Synthetic oligonucleotide
uggugaucuggguaauaguuucucc

SEQ ID NO: 165299 - RNA, 25 nt, Artificial Sequence
  Description of Artificial Sequence: Synthetic oligonucleotide
gaucuggguaauaguuucuccaaau

SEQ ID NO: 165300 - RNA, 25 nt, Artificial Sequence
  Description of Artificial Sequence: Synthetic oligonucleotide
ggaugugaugaauacuuccuagaaa

SEQ ID NO: 165301 - RNA, 25 nt, Artificial Sequence
  Description of Artificial Sequence: Synthetic oligonucleotide
cauuuccacagcuacaccauauaug

SEQ ID NO: 165302 - RNA, 25 nt, Artificial Sequence
  Description of Artificial Sequence: Synthetic oligonucleotide
acagcuacaccauauaugaauggag

SEQ ID NO: 165303 - RNA, 25 nt, Artificial Sequence
  Description of Artificial Sequence: Synthetic oligonucleotide
ugcaguucuuacacgagaagaagau

SEQ ID NO: 165304 - RNA, 25 nt, Artificial Sequence
  Description of Artificial Sequence: Synthetic oligonucleotide
acgagaagaagaucauuuacaggga

SEQ ID NO: 165305 - RNA, 25 nt, Artificial Sequence
  Description of Artificial Sequence: Synthetic oligonucleotide
cgagaagaagaucauuuacagggac

SEQ ID NO: 165306 - RNA, 25 nt, Artificial Sequence
  Description of Artificial Sequence: Synthetic oligonucleotide
aagaagaucauuuacagggaccuga

SEQ ID NO: 165307 - RNA, 25 nt, Artificial Sequence
  Description of Artificial Sequence: Synthetic oligonucleotide
agaggaagagguguuugacugcauc

SEQ ID NO: 165308 - RNA, 25 nt, Artificial Sequence
  Description of Artificial Sequence: Synthetic oligonucleotide
gaggaagagguguuugacugcaucg

SEQ ID NO: 165309 - RNA, 25 nt, Artificial Sequence
  Description of Artificial Sequence: Synthetic oligonucleotide
cuacuuugagggcgaguucacaggg

SEQ ID NO: 165310 - RNA, 25 nt, Artificial Sequence
  Description of Artificial Sequence: Synthetic oligonucleotide
agggcaucuccuggcaccucugucc

SEQ ID NO: 165311 - RNA, 25 nt, Artificial Sequence
  Description of Artificial Sequence: Synthetic oligonucleotide
ggagugauaugguuugucuuuuuaa

SEQ ID NO: 165312 - RNA, 25 nt, Artificial Sequence
  Description of Artificial Sequence: Synthetic oligonucleotide
gagugauaugguuugucuuuuuaag

SEQ ID NO: 165313 - RNA, 25 nt, Artificial Sequence
  Description of Artificial Sequence: Synthetic oligonucleotide
ugcaguaaagauccuaaagguuguc

SEQ ID NO: 165314 - RNA, 25 nt, Artificial Sequence
  Description of Artificial Sequence: Synthetic oligonucleotide
aguaaagauccuaaagguugucgac

SEQ ID NO: 165315 - RNA, 25 nt, Artificial Sequence
  Description of Artificial Sequence: Synthetic oligonucleotide
ugacaaaggacaaccuggcaauugu

SEQ ID NO: 165316 - RNA, 25 nt, Artificial Sequence
  Description of Artificial Sequence: Synthetic oligonucleotide
gcaauugugacccaguggugcgagg

SEQ ID NO: 165317 - RNA, 25 nt, Artificial Sequence
  Description of Artificial Sequence: Synthetic oligonucleotide
aacaucauccauagagacaugaaau

SEQ ID NO: 165318 - RNA, 25 nt, Artificial Sequence
  Description of Artificial Sequence: Synthetic oligonucleotide
ugaaauccaacaauauauuucucca

SEQ ID NO: 165319 - RNA, 25 nt, Artificial Sequence
  Description of Artificial Sequence: Synthetic oligonucleotide
aacaauauauuucuccaugaaggcu

SEQ ID NO: 165320 - RNA, 25 nt, Artificial Sequence
  Description of Artificial Sequence: Synthetic oligonucleotide
aacaguaaagucacgcuggaguggu

SEQ ID NO: 165321 - RNA, 25 nt, Artificial Sequence
  Description of Artificial Sequence: Synthetic oligonucleotide
ugugaagaaaguaaaggaagagagg

SEQ ID NO: 165322 - RNA, 25 nt, Artificial Sequence
  Description of Artificial Sequence: Synthetic oligonucleotide
cuuccgagccauccuugcaucgggc

SEQ ID NO: 165323 - RNA, 25 nt, Artificial Sequence
  Description of Artificial Sequence: Synthetic oligonucleotide
aauggagguugaauauccuacugug

SEQ ID NO: 165324 - RNA, 25 nt, Artificial Sequence
  Description of Artificial Sequence: Synthetic oligonucleotide
ggagguugaauauccuacuguguaa

SEQ ID NO: 165325 - RNA, 25 nt, Artificial Sequence
  Description of Artificial Sequence: Synthetic oligonucleotide
auuuugaguuuucccuuguagugua

SEQ ID NO: 165326 - RNA, 25 nt, Artificial Sequence
  Description of Artificial Sequence: Synthetic oligonucleotide
uauccuguuuguucuuuguugauug

SEQ ID NO: 165327 - RNA, 25 nt, Artificial Sequence
  Description of Artificial Sequence: Synthetic oligonucleotide
ccuguuuguucuuuguugauugaaa

SEQ ID NO: 165328 - RNA, 25 nt, Artificial Sequence
  Description of Artificial Sequence: Synthetic oligonucleotide
cucuacagccuucuuuuucuuccau

SEQ ID NO: 165329 - RNA, 25 nt, Artificial Sequence
  Description of Artificial Sequence: Synthetic oligonucleotide
ucuuccauagcuaaucuuccuucua

SEQ ID NO: 165330 - RNA, 25 nt, Artificial Sequence
  Description of Artificial Sequence: Synthetic oligonucleotide
auaaucuuccuguugaaugcuucau

SEQ ID NO: 165331 - RNA, 25 nt, Artificial Sequence
  Description of Artificial Sequence: Synthetic oligonucleotide
uaaucuuccuguugaaugcuucaug

SEQ ID NO: 165332 - RNA, 25 nt, Artificial Sequence
  Description of Artificial Sequence: Synthetic oligonucleotide
cuucaugacuugaauucuacuuuga

SEQ ID NO: 165333 - RNA, 25 nt, Artificial Sequence
  Description of Artificial Sequence: Synthetic oligonucleotide
aagagggagagaagcaacuacagac

SEQ ID NO: 165334 - RNA, 25 nt, Artificial Sequence
  Description of Artificial Sequence: Synthetic oligonucleotide
cgucuccuaccagaccaaggucaac

SEQ ID NO: 165335 - RNA, 25 nt, Artificial Sequence
  Description of Artificial Sequence: Synthetic oligonucleotide
gaucaaucggcccgacuaucucgac

SEQ ID NO: 165336 - RNA, 25 nt, Artificial Sequence
  Description of Artificial Sequence: Synthetic oligonucleotide
ggacgaacauccaaccuucccaaac

SEQ ID NO: 165337 - RNA, 25 nt, Artificial Sequence
  Description of Artificial Sequence: Synthetic oligonucleotide
agggucggaacccaagcuuagaacu

SEQ ID NO: 165338 - RNA, 25 nt, Artificial Sequence
  Description of Artificial Sequence: Synthetic oligonucleotide
ucggaacccaagcuuagaacuuuaa

SEQ ID NO: 165339 - RNA, 25 nt, Artificial Sequence
  Description of Artificial Sequence: Synthetic oligonucleotide
acccaagcuuagaacuuuaagcaac

SEQ ID NO: 165340 - RNA, 25 nt, Artificial Sequence
  Description of Artificial Sequence: Synthetic oligonucleotide
gaacuuuaagcaacaagaccaccac

SEQ ID NO: 165341 - RNA, 25 nt, Artificial Sequence
  Description of Artificial Sequence: Synthetic oligonucleotide
acuauucaguggcgagaaauaaagu

SEQ ID NO: 165342 - RNA, 25 nt, Artificial Sequence
  Description of Artificial Sequence: Synthetic oligonucleotide
cuauucaguggcgagaaauaaaguu

SEQ ID NO: 165343 - RNA, 25 nt, Artificial Sequence
  Description of Artificial Sequence: Synthetic oligonucleotide
aaacacagauaacaggaaaugaucc

SEQ ID NO: 165344 - RNA, 25 nt, Artificial Sequence
  Description of Artificial Sequence: Synthetic oligonucleotide
cuuaagaaaagagaagaaaugaaac

SEQ ID NO: 165345 - RNA, 25 nt, Artificial Sequence
  Description of Artificial Sequence: Synthetic oligonucleotide
cugaaggaguguguuuccauccucc

SEQ ID NO: 165346 - RNA, 25 nt, Artificial Sequence
  Description of Artificial Sequence: Synthetic oligonucleotide
ucaccgcgggacugaaaaucuuuga

SEQ ID NO: 165347 - RNA, 25 nt, Artificial Sequence
  Description of Artificial Sequence: Synthetic oligonucleotide
agcagaaauaagcgugccguucagg

SEQ ID NO: 165348 - RNA, 25 nt, Artificial Sequence
  Description of Artificial Sequence: Synthetic oligonucleotide
aagcgugccguucaggguccagaag

SEQ ID NO: 165349 - RNA, 25 nt, Artificial Sequence
  Description of Artificial Sequence: Synthetic oligonucleotide
agaaacagucacucaagacugcuug

SEQ ID NO: 165350 - RNA, 25 nt, Artificial Sequence
  Description of Artificial Sequence: Synthetic oligonucleotide
agaggaagaagguccaugucuuugg

SEQ ID NO: 165351 - RNA, 25 nt, Artificial Sequence
  Description of Artificial Sequence: Synthetic oligonucleotide
uguauucaaaauaugccugaaacac

SEQ ID NO: 165352 - RNA, 25 nt, Artificial Sequence
  Description of Artificial Sequence: Synthetic oligonucleotide
auuuuccucccuuucucuguaccuc

SEQ ID NO: 165353 - RNA, 25 nt, Artificial Sequence
  Description of Artificial Sequence: Synthetic oligonucleotide
caaagaaagauagagcaagacaaga

SEQ ID NO: 165354 - RNA, 25 nt, Artificial Sequence
  Description of Artificial Sequence: Synthetic oligonucleotide
aagaaagauagagcaagacaagaaa

SEQ ID NO: 165355 - RNA, 25 nt, Artificial Sequence
  Description of Artificial Sequence: Synthetic oligonucleotide
gaaagcauuuguuuguacaagaucc

SEQ ID NO: 165356 - RNA, 25 nt, Artificial Sequence
  Description of Artificial Sequence: Synthetic oligonucleotide
ugaguuaaacgaacguacuugcaga

SEQ ID NO: 165357 - RNA, 25 nt, Artificial Sequence
  Description of Artificial Sequence: Synthetic oligonucleotide
acugauacagaacgaucgauacaga

SEQ ID NO: 165358 - RNA, 25 nt, Artificial Sequence
  Description of Artificial Sequence: Synthetic oligonucleotide
auauuauauauauauaaaaauaaau

SEQ ID NO: 165359 - RNA, 25 nt, Artificial Sequence
  Description of Artificial Sequence: Synthetic oligonucleotide
auuauauauauauaaaaauaaauau

SEQ ID NO: 165360 - RNA, 25 nt, Artificial Sequence
  Description of Artificial Sequence: Synthetic oligonucleotide
ucacuggauguauuugacugcugug

SEQ ID NO: 165361 - RNA, 25 nt, Artificial Sequence
  Description of Artificial Sequence: Synthetic oligonucleotide
cagggaagaggaggagaugagagac

SEQ ID NO: 165362 - RNA, 25 nt, Artificial Sequence
  Description of Artificial Sequence: Synthetic oligonucleotide
augaucuuuuuuuugucccacuugg

SEQ ID NO: 165363 - RNA, 27 nt, Artificial Sequence
  Description of Artificial Sequence: Synthetic oligonucleotide
ggccgugaacuccucaucaaaauaccu

SEQ ID NO: 165364 - RNA, 27 nt, Artificial Sequence
  Description of Artificial Sequence: Synthetic oligonucleotide
uggugugauggugaucaucugggccgu

SEQ ID NO: 165365 - RNA, 27 nt, Artificial Sequence
  Description of Artificial Sequence: Synthetic oligonucleotide
aaacccgcaggauaguuuucuucccua

SEQ ID NO: 165366 - RNA, 27 nt, Artificial Sequence
  Description of Artificial Sequence: Synthetic oligonucleotide
caaacuggaugaaauaaauuaaaaccc

SEQ ID NO: 165367 - RNA, 27 nt, Artificial Sequence
  Description of Artificial Sequence: Synthetic oligonucleotide
agaaguccuuaacauuucccuacguga

SEQ ID NO: 165368 - RNA, 27 nt, Artificial Sequence
  Description of Artificial Sequence: Synthetic oligonucleotide
cucugucccacuggguaaacccuggcc

SEQ ID NO: 165369 - RNA, 27 nt, Artificial Sequence
  Description of Artificial Sequence: Synthetic oligonucleotide
cacaauaacaaauuuaaaccuugcucc

SEQ ID NO: 165370 - RNA, 27 nt, Artificial Sequence
  Description of Artificial Sequence: Synthetic oligonucleotide
aaaugcauuugaacaacauaauacaca

SEQ ID NO: 165371 - RNA, 27 nt, Artificial Sequence
  Description of Artificial Sequence: Synthetic oligonucleotide
ggcuuuccugucacaaagauuaaaaac

SEQ ID NO: 165372 - RNA, 27 nt, Artificial Sequence
  Description of Artificial Sequence: Synthetic oligonucleotide
agggcuuuccugucacaaagauuaaaa

SEQ ID NO: 165373 - RNA, 27 nt, Artificial Sequence
  Description of Artificial Sequence: Synthetic oligonucleotide
ggccaugcugggagacauaagcagcag

SEQ ID NO: 165374 - RNA, 27 nt, Artificial Sequence
  Description of Artificial Sequence: Synthetic oligonucleotide
ucagggagaagcuucugaaacacuucu

SEQ ID NO: 165375 - RNA, 27 nt, Artificial Sequence
  Description of Artificial Sequence: Synthetic oligonucleotide
aagggcuucuuccuuauugauggucag

SEQ ID NO: 165376 - RNA, 27 nt, Artificial Sequence
  Description of Artificial Sequence: Synthetic oligonucleotide
ugaagggcuucuuccuuauugaugguc

SEQ ID NO: 165377 - RNA, 27 nt, Artificial Sequence
  Description of Artificial Sequence: Synthetic oligonucleotide
cgcugaagggcuucuuccuuauugaug

SEQ ID NO: 165378 - RNA, 27 nt, Artificial Sequence
  Description of Artificial Sequence: Synthetic oligonucleotide
gccgcugaagggcuucuuccuuauuga

SEQ ID NO: 165379 - RNA, 27 nt, Artificial Sequence
  Description of Artificial Sequence: Synthetic oligonucleotide
acuggccgcugaagggcuucuuccuua

SEQ ID NO: 165380 - RNA, 27 nt, Artificial Sequence
  Description of Artificial Sequence: Synthetic oligonucleotide
cggagcuuuucaccuuuaguuaugcuu

SEQ ID NO: 165381 - RNA, 27 nt, Artificial Sequence
  Description of Artificial Sequence: Synthetic oligonucleotide
ccggagcuuuucaccuuuaguuaugcu

SEQ ID NO: 165382 - RNA, 27 nt, Artificial Sequence
  Description of Artificial Sequence: Synthetic oligonucleotide
cagacuguugacuggcgugauguaguu

SEQ ID NO: 165383 - RNA, 27 nt, Artificial Sequence
  Description of Artificial Sequence: Synthetic oligonucleotide
cuuuugaacucugcuuaaauccagugg

SEQ ID NO: 165384 - RNA, 27 nt, Artificial Sequence
  Description of Artificial Sequence: Synthetic oligonucleotide
gcuuuugaacucugcuuaaauccagug

SEQ ID NO: 165385 - RNA, 27 nt, Artificial Sequence
  Description of Artificial Sequence: Synthetic oligonucleotide
agggcuuuugaacucugcuuaaaucca

SEQ ID NO: 165386 - RNA, 27 nt, Artificial Sequence
  Description of Artificial Sequence: Synthetic oligonucleotide
aagggcuuuugaacucugcuuaaaucc

SEQ ID NO: 165387 - RNA, 27 nt, Artificial Sequence
  Description of Artificial Sequence: Synthetic oligonucleotide
ugaagggcuuuugaacucugcuuaaau

SEQ ID NO: 165388 - RNA, 27 nt, Artificial Sequence
  Description of Artificial Sequence: Synthetic oligonucleotide
cugaagggcuuuugaacucugcuuaaa

SEQ ID NO: 165389 - RNA, 27 nt, Artificial Sequence
  Description of Artificial Sequence: Synthetic oligonucleotide
cgcugaagggcuuuugaacucugcuua

SEQ ID NO: 165390 - RNA, 27 nt, Artificial Sequence
  Description of Artificial Sequence: Synthetic oligonucleotide
cgagcggcuucacucagacccugaggc

SEQ ID NO: 165391 - RNA, 27 nt, Artificial Sequence
  Description of Artificial Sequence: Synthetic oligonucleotide
uugacuggcgugauguaguugcuuggg

SEQ ID NO: 165392 - RNA, 27 nt, Artificial Sequence
  Description of Artificial Sequence: Synthetic oligonucleotide
cacgcaccaagaagcugccauugaucc

SEQ ID NO: 165393 - RNA, 27 nt, Artificial Sequence
  Description of Artificial Sequence: Synthetic oligonucleotide
cugaugaauccaaugugggcuggaauc

SEQ ID NO: 165394 - RNA, 27 nt, Artificial Sequence
  Description of Artificial Sequence: Synthetic oligonucleotide
cuuagguauuccacauucucagcugug

SEQ ID NO: 165395 - RNA, 27 nt, Artificial Sequence
  Description of Artificial Sequence: Synthetic oligonucleotide
ugagccucaaauuaggagauacguuuu

SEQ ID NO: 165396 - RNA, 27 nt, Artificial Sequence
  Description of Artificial Sequence: Synthetic oligonucleotide
ccaauuguagagaaauuauuuuaggaa

SEQ ID NO: 165397 - RNA, 27 nt, Artificial Sequence
  Description of Artificial Sequence: Synthetic oligonucleotide
ggcuccuaacuagcugaaucuuccaau

SEQ ID NO: 165398 - RNA, 27 nt, Artificial Sequence
  Description of Artificial Sequence: Synthetic oligonucleotide
guggauauugacuaggagaguuuaaaa

SEQ ID NO: 165399 - RNA, 27 nt, Artificial Sequence
  Description of Artificial Sequence: Synthetic oligonucleotide
ugugacugaacauaacuguaggcugaa

SEQ ID NO: 165400 - RNA, 27 nt, Artificial Sequence
  Description of Artificial Sequence: Synthetic oligonucleotide
guaugugugugugacugaacauaacug

SEQ ID NO: 165401 - RNA, 27 nt, Artificial Sequence
  Description of Artificial Sequence: Synthetic oligonucleotide
aagcaaaaggaacauuuuguaugugug

SEQ ID NO: 165402 - RNA, 27 nt, Artificial Sequence
  Description of Artificial Sequence: Synthetic oligonucleotide
aaaaauuacuuuaaaagcaaaaggaac

SEQ ID NO: 165403 - RNA, 27 nt, Artificial Sequence
  Description of Artificial Sequence: Synthetic oligonucleotide
ccauugacuguugcuucacaggucaga

SEQ ID NO: 165404 - RNA, 27 nt, Artificial Sequence
  Description of Artificial Sequence: Synthetic oligonucleotide
auugguuugucgaugugugagauaguu

SEQ ID NO: 165405 - RNA, 27 nt, Artificial Sequence
  Description of Artificial Sequence: Synthetic oligonucleotide
agugguagcaguacaauugaggacaag

SEQ ID NO: 165406 - RNA, 27 nt, Artificial Sequence
  Description of Artificial Sequence: Synthetic oligonucleotide
uaagaccgcuugccagcuacgguuuca

SEQ ID NO: 165407 - RNA, 27 nt, Artificial Sequence
  Description of Artificial Sequence: Synthetic oligonucleotide
agccgguaagaccgcuugccagcuacg

SEQ ID NO: 165408 - RNA, 27 nt, Artificial Sequence
  Description of Artificial Sequence: Synthetic oligonucleotide
gguaacccaucuuuuaaccauacaacu

SEQ ID NO: 165409 - RNA, 27 nt, Artificial Sequence
  Description of Artificial Sequence: Synthetic oligonucleotide
ucgcagguaacccaucuuuuaaccaua

SEQ ID NO: 165410 - RNA, 27 nt, Artificial Sequence
  Description of Artificial Sequence: Synthetic oligonucleotide
cucagcaagauuguauaauucccugca

SEQ ID NO: 165411 - RNA, 27 nt, Artificial Sequence
  Description of Artificial Sequence: Synthetic oligonucleotide
acuguuuuaugcucagcaagauuguau

SEQ ID NO: 165412 - RNA, 27 nt, Artificial Sequence
  Description of Artificial Sequence: Synthetic oligonucleotide
aggauaaaggacucuucauuauuggaa

SEQ ID NO: 165413 - RNA, 27 nt, Artificial Sequence
  Description of Artificial Sequence: Synthetic oligonucleotide
caacuugcguuggaacauccaaagugu

SEQ ID NO: 165414 - RNA, 27 nt, Artificial Sequence
  Description of Artificial Sequence: Synthetic oligonucleotide
augguuucaguuuaguggaagcauuua

SEQ ID NO: 165415 - RNA, 27 nt, Artificial Sequence
  Description of Artificial Sequence: Synthetic oligonucleotide
auauuuaacaaagucaaacuuucucac

SEQ ID NO: 165416 - RNA, 27 nt, Artificial Sequence
  Description of Artificial Sequence: Synthetic oligonucleotide
aacuuuuaauauacaguaguucuuuuc

SEQ ID NO: 165417 - RNA, 27 nt, Artificial Sequence
  Description of Artificial Sequence: Synthetic oligonucleotide
guuaagucaaaacccguauuucuaaag

SEQ ID NO: 165418 - RNA, 27 nt, Artificial Sequence
  Description of Artificial Sequence: Synthetic oligonucleotide
gugcugaguuugcuguacccauguuga

SEQ ID NO: 165419 - RNA, 27 nt, Artificial Sequence
  Description of Artificial Sequence: Synthetic oligonucleotide
ugaggucagcaucuucugugucuuuac

SEQ ID NO: 165420 - RNA, 27 nt, Artificial Sequence
  Description of Artificial Sequence: Synthetic oligonucleotide
gcgaucugaauaaaccucccuacuagc

SEQ ID NO: 165421 - RNA, 27 nt, Artificial Sequence
  Description of Artificial Sequence: Synthetic oligonucleotide
aucccagaacccugcugcagaaggcca

SEQ ID NO: 165422 - RNA, 27 nt, Artificial Sequence
  Description of Artificial Sequence: Synthetic oligonucleotide
cauaauuuccaauauguaccagaccuu

SEQ ID NO: 165423 - RNA, 27 nt, Artificial Sequence
  Description of Artificial Sequence: Synthetic oligonucleotide
cuagugcuuccaucggaaggacuaggu

SEQ ID NO: 165424 - RNA, 27 nt, Artificial Sequence
  Description of Artificial Sequence: Synthetic oligonucleotide
uccacauaaaaacaauauucacuggga

SEQ ID NO: 165425 - RNA, 27 nt, Artificial Sequence
  Description of Artificial Sequence: Synthetic oligonucleotide
ucuaccaauuccaacuugaauucauug

SEQ ID NO: 165426 - RNA, 27 nt, Artificial Sequence
  Description of Artificial Sequence: Synthetic oligonucleotide
ucuccaagucuaaaucuguguccugag

SEQ ID NO: 165427 - RNA, 27 nt, Artificial Sequence
  Description of Artificial Sequence: Synthetic oligonucleotide
uggaauacuguaacugugcuuugagga

SEQ ID NO: 165428 - RNA, 27 nt, Artificial Sequence
  Description of Artificial Sequence: Synthetic oligonucleotide
uuaauucaucagugguggcagugguag

SEQ ID NO: 165429 - RNA, 27 nt, Artificial Sequence
  Description of Artificial Sequence: Synthetic oligonucleotide
gugaugauguggcacuaguaguuucuu

SEQ ID NO: 165430 - RNA, 27 nt, Artificial Sequence
  Description of Artificial Sequence: Synthetic oligonucleotide
ucuguuuggugaggcuguccgacuuug

SEQ ID NO: 165431 - RNA, 27 nt, Artificial Sequence
  Description of Artificial Sequence: Synthetic oligonucleotide
ccaucauguuccauuuuucgcuuucuc

SEQ ID NO: 165432 - RNA, 27 nt, Artificial Sequence
  Description of Artificial Sequence: Synthetic oligonucleotide
gcagucuacaugcuaaaucagagggua

SEQ ID NO: 165433 - RNA, 27 nt, Artificial Sequence
  Description of Artificial Sequence: Synthetic oligonucleotide
cauaaauagauccuuaaauagcucaaa

SEQ ID NO: 165434 - RNA, 27 nt, Artificial Sequence
  Description of Artificial Sequence: Synthetic oligonucleotide
ugauaauagugcuuuuucaccuuuuuc

SEQ ID NO: 165435 - RNA, 27 nt, Artificial Sequence
  Description of Artificial Sequence: Synthetic oligonucleotide
gcagaacugauaauagugcuuuuucac

SEQ ID NO: 165436 - RNA, 27 nt, Artificial Sequence
  Description of Artificial Sequence: Synthetic oligonucleotide
guagguuuaaucuuucuuuucagccau

SEQ ID NO: 165437 - RNA, 27 nt, Artificial Sequence
  Description of Artificial Sequence: Synthetic oligonucleotide
agaaggauuuuauuauaaggguuuaau

SEQ ID NO: 165438 - RNA, 27 nt, Artificial Sequence
  Description of Artificial Sequence: Synthetic oligonucleotide
gucuacagcauuggcuaauaguaugaa

SEQ ID NO: 165439 - RNA, 27 nt, Artificial Sequence
  Description of Artificial Sequence: Synthetic oligonucleotide
cuauuccuaucaaaaugcuucugucua

SEQ ID NO: 165440 - RNA, 27 nt, Artificial Sequence
  Description of Artificial Sequence: Synthetic oligonucleotide
ucagggccauuaucuuauuugcucuau

SEQ ID NO: 165441 - RNA, 27 nt, Artificial Sequence
  Description of Artificial Sequence: Synthetic oligonucleotide
ugcuugaggaagagaaaaauguugguc

SEQ ID NO: 165442 - RNA, 27 nt, Artificial Sequence
  Description of Artificial Sequence: Synthetic oligonucleotide
ugggcugaacuuuucucauacuuaaag

SEQ ID NO: 165443 - RNA, 27 nt, Artificial Sequence
  Description of Artificial Sequence: Synthetic oligonucleotide
gguucagcagccaucuuuauuccugcg

SEQ ID NO: 165444 - RNA, 27 nt, Artificial Sequence
  Description of Artificial Sequence: Synthetic oligonucleotide
ugaagagaacuuggucauucaaauuuc

SEQ ID NO: 165445 - RNA, 27 nt, Artificial Sequence
  Description of Artificial Sequence: Synthetic oligonucleotide
cucuaggcuggcuaucuuuauacauac

SEQ ID NO: 165446 - RNA, 27 nt, Artificial Sequence
  Description of Artificial Sequence: Synthetic oligonucleotide
acacuucacagagauaguuacagccau

SEQ ID NO: 165447 - RNA, 27 nt, Artificial Sequence
  Description of Artificial Sequence: Synthetic oligonucleotide
uugaaauuuucucacacuucacagaga

SEQ ID NO: 165448 - RNA, 27 nt, Artificial Sequence
  Description of Artificial Sequence: Synthetic oligonucleotide
ucaggaggauucauuuccuuaaaggaa

SEQ ID NO: 165449 - RNA, 27 nt, Artificial Sequence
  Description of Artificial Sequence: Synthetic oligonucleotide
auaugaugucacuuuuuguauccuuga

SEQ ID NO: 165450 - RNA, 27 nt, Artificial Sequence
  Description of Artificial Sequence: Synthetic oligonucleotide
uaugaugaagauucaaauugcaucuua

SEQ ID NO: 165451 - RNA, 27 nt, Artificial Sequence
  Description of Artificial Sequence: Synthetic oligonucleotide
uuaauagcuagucuucguuuugaacag

SEQ ID NO: 165452 - RNA, 27 nt, Artificial Sequence
  Description of Artificial Sequence: Synthetic oligonucleotide
auuuuuaguagagaugagguuucacca

SEQ ID NO: 165453 - RNA, 27 nt, Artificial Sequence
  Description of Artificial Sequence: Synthetic oligonucleotide
aggcgagauagagcuucucuuucguuc

SEQ ID NO: 165454 - RNA, 27 nt, Artificial Sequence
  Description of Artificial Sequence: Synthetic oligonucleotide
aacuggaccgaaggcgcuuguggagaa

SEQ ID NO: 165455 - RNA, 27 nt, Artificial Sequence
  Description of Artificial Sequence: Synthetic oligonucleotide
gcggcuacaucuuuggaaucuucuccu

SEQ ID NO: 165456 - RNA, 27 nt, Artificial Sequence
  Description of Artificial Sequence: Synthetic oligonucleotide
caagucuccucauugaauccagauugg

SEQ ID NO: 165457 - RNA, 27 nt, Artificial Sequence
  Description of Artificial Sequence: Synthetic oligonucleotide
uccucacuacucucaaaucuguucugg

SEQ ID NO: 165458 - RNA, 27 nt, Artificial Sequence
  Description of Artificial Sequence: Synthetic oligonucleotide
uuuguacucaucugcacagcucuggcu

SEQ ID NO: 165459 - RNA, 27 nt, Artificial Sequence
  Description of Artificial Sequence: Synthetic oligonucleotide
gcccauuaacaacaacaaucugaggug

SEQ ID NO: 165460 - RNA, 27 nt, Artificial Sequence
  Description of Artificial Sequence: Synthetic oligonucleotide
aauaaauuaaaaauaauuaaaauagug

SEQ ID NO: 165461 - RNA, 27 nt, Artificial Sequence
  Description of Artificial Sequence: Synthetic oligonucleotide
cauauuuaaauauuaauaaauuaaaaa

SEQ ID NO: 165462 - RNA, 27 nt, Artificial Sequence
  Description of Artificial Sequence: Synthetic oligonucleotide
gaaacaaaggauauucaaacugcauag

SEQ ID NO: 165463 - RNA, 27 nt, Artificial Sequence
  Description of Artificial Sequence: Synthetic oligonucleotide
caaacacuuagacgccagcagcauggg

SEQ ID NO: 165464 - RNA, 27 nt, Artificial Sequence
  Description of Artificial Sequence: Synthetic oligonucleotide
uuugucacaggugaaaugcacaucuga

SEQ ID NO: 165465 - RNA, 27 nt, Artificial Sequence
  Description of Artificial Sequence: Synthetic oligonucleotide
uaauucagccuggcacagguuuugauc

SEQ ID NO: 165466 - RNA, 27 nt, Artificial Sequence
  Description of Artificial Sequence: Synthetic oligonucleotide
auuguaagaaugacuacccacauucac

SEQ ID NO: 165467 - RNA, 27 nt, Artificial Sequence
  Description of Artificial Sequence: Synthetic oligonucleotide
caauuguaagaaugacuacccacauuc

SEQ ID NO: 165468 - RNA, 27 nt, Artificial Sequence
  Description of Artificial Sequence: Synthetic oligonucleotide
guacacucucugaugcucauuuucaua

SEQ ID NO: 165469 - RNA, 27 nt, Artificial Sequence
  Description of Artificial Sequence: Synthetic oligonucleotide
cugcugaguucuacaugaaaagcaaau

SEQ ID NO: 165470 - RNA, 27 nt, Artificial Sequence
  Description of Artificial Sequence: Synthetic oligonucleotide
uacugaaaauaaauauagaaauacaac

SEQ ID NO: 165471 - RNA, 27 nt, Artificial Sequence
  Description of Artificial Sequence: Synthetic oligonucleotide
uuccauuuaagaaacauuaaucaaaac

SEQ ID NO: 165472 - RNA, 27 nt, Artificial Sequence
  Description of Artificial Sequence: Synthetic oligonucleotide
acaauuuuaggcacuauacacguuguu

SEQ ID NO: 165473 - RNA, 27 nt, Artificial Sequence
  Description of Artificial Sequence: Synthetic oligonucleotide
ccagauguuaguagccaaggauauggu

SEQ ID NO: 165474 - RNA, 27 nt, Artificial Sequence
  Description of Artificial Sequence: Synthetic oligonucleotide
agcucacagucuccagauguuaguagc

SEQ ID NO: 165475 - RNA, 27 nt, Artificial Sequence
  Description of Artificial Sequence: Synthetic oligonucleotide
auuaauaaaaagcacacaacuuauggc

SEQ ID NO: 165476 - RNA, 27 nt, Artificial Sequence
  Description of Artificial Sequence: Synthetic oligonucleotide
aauguaagaagagccaaaaugaugcau

SEQ ID NO: 165477 - RNA, 27 nt, Artificial Sequence
  Description of Artificial Sequence: Synthetic oligonucleotide
acauuuuuacaaauguaagaagagcca

SEQ ID NO: 165478 - RNA, 27 nt, Artificial Sequence
  Description of Artificial Sequence: Synthetic oligonucleotide
aauaugaauuaagaugaccuaaucugu

SEQ ID NO: 165479 - RNA, 27 nt, Artificial Sequence
  Description of Artificial Sequence: Synthetic oligonucleotide
ucaugauuaguucuuucaauuccaucc

SEQ ID NO: 165480 - RNA, 27 nt, Artificial Sequence
  Description of Artificial Sequence: Synthetic oligonucleotide
cccaagagcagaaggaaugagugugca

SEQ ID NO: 165481 - RNA, 27 nt, Artificial Sequence
  Description of Artificial Sequence: Synthetic oligonucleotide
cucaaagcuacugguuaccucuacacc

SEQ ID NO: 165482 - RNA, 27 nt, Artificial Sequence
  Description of Artificial Sequence: Synthetic oligonucleotide
ugaaauauuacguggcaugugguuggg

SEQ ID NO: 165483 - RNA, 27 nt, Artificial Sequence
  Description of Artificial Sequence: Synthetic oligonucleotide
agugaagagaauaacuuguuuccgaag

SEQ ID NO: 165484 - RNA, 27 nt, Artificial Sequence
  Description of Artificial Sequence: Synthetic oligonucleotide
uuucuuagcauuaguuauugggaguga

SEQ ID NO: 165485 - RNA, 27 nt, Artificial Sequence
  Description of Artificial Sequence: Synthetic oligonucleotide
uugauuuucagcauuucuuagcauuag

SEQ ID NO: 165486 - RNA, 27 nt, Artificial Sequence
  Description of Artificial Sequence: Synthetic oligonucleotide
aaaguaaucauauuuagagaaagacag

SEQ ID NO: 165487 - RNA, 27 nt, Artificial Sequence
  Description of Artificial Sequence: Synthetic oligonucleotide
uguagaacaaaaugccugaaauucagc

SEQ ID NO: 165488 - RNA, 27 nt, Artificial Sequence
  Description of Artificial Sequence: Synthetic oligonucleotide
gagagucccgggugagagggaaucgcc

SEQ ID NO: 165489 - RNA, 27 nt, Artificial Sequence
  Description of Artificial Sequence: Synthetic oligonucleotide
cuuuacuuuaaagguucacuuuccuug

SEQ ID NO: 165490 - RNA, 27 nt, Artificial Sequence
  Description of Artificial Sequence: Synthetic oligonucleotide
ccaggcuuccagagcaugcagccuccu

SEQ ID NO: 165491 - RNA, 27 nt, Artificial Sequence
  Description of Artificial Sequence: Synthetic oligonucleotide
cucucuuuuguuuucuguucagagaaa

SEQ ID NO: 165492 - RNA, 27 nt, Artificial Sequence
  Description of Artificial Sequence: Synthetic oligonucleotide
cggcauaacugauuacagccaaguuca

SEQ ID NO: 165493 - RNA, 27 nt, Artificial Sequence
  Description of Artificial Sequence: Synthetic oligonucleotide
uggacuucuuuuaauuuuggcuucuuc

SEQ ID NO: 165494 - RNA, 27 nt, Artificial Sequence
  Description of Artificial Sequence: Synthetic oligonucleotide
uaaccucaccuggacuucuuuuaauuu

SEQ ID NO: 165495 - RNA, 27 nt, Artificial Sequence
  Description of Artificial Sequence: Synthetic oligonucleotide
guccucuucccgauaauccggauucag

SEQ ID NO: 165496 - RNA, 27 nt, Artificial Sequence
  Description of Artificial Sequence: Synthetic oligonucleotide
acaauacuugcuuugaugucacauuaa

SEQ ID NO: 165497 - RNA, 27 nt, Artificial Sequence
  Description of Artificial Sequence: Synthetic oligonucleotide
gagugcuacaauacuugcuuugauguc

SEQ ID NO: 165498 - RNA, 27 nt, Artificial Sequence
  Description of Artificial Sequence: Synthetic oligonucleotide
auuugugguuuuguuuucucucucucu

SEQ ID NO: 165499 - RNA, 27 nt, Artificial Sequence
  Description of Artificial Sequence: Synthetic oligonucleotide
uguaugggcuuaaauacuacagcgagg

SEQ ID NO: 165500 - RNA, 27 nt, Artificial Sequence
  Description of Artificial Sequence: Synthetic oligonucleotide
cuguaugggcuuaaauacuacagcgag

SEQ ID NO: 165501 - RNA, 27 nt, Artificial Sequence
  Description of Artificial Sequence: Synthetic oligonucleotide
ggaagguuucuguaugggcuuaaauac

SEQ ID NO: 165502 - RNA, 27 nt, Artificial Sequence
  Description of Artificial Sequence: Synthetic oligonucleotide
guagguauaccauguuuauuuuaauac

SEQ ID NO: 165503 - RNA, 27 nt, Artificial Sequence
  Description of Artificial Sequence: Synthetic oligonucleotide
uccgaaaacuggccgaucagaacagcc

SEQ ID NO: 165504 - RNA, 27 nt, Artificial Sequence
  Description of Artificial Sequence: Synthetic oligonucleotide
cccuguuccaaaguucaaauuauuugu

SEQ ID NO: 165505 - RNA, 27 nt, Artificial Sequence
  Description of Artificial Sequence: Synthetic oligonucleotide
acuggaaaguuaaauuaaggucgcaau

SEQ ID NO: 165506 - RNA, 27 nt, Artificial Sequence
  Description of Artificial Sequence: Synthetic oligonucleotide
caaaaccaaacuuuagcuuucucagcc

SEQ ID NO: 165507 - RNA, 27 nt, Artificial Sequence
  Description of Artificial Sequence: Synthetic oligonucleotide
uacagugggaaguagcaucuuuacuuu

SEQ ID NO: 165508 - RNA, 27 nt, Artificial Sequence
  Description of Artificial Sequence: Synthetic oligonucleotide
ucauaugguaucagcaauuaagcagua

SEQ ID NO: 165509 - RNA, 27 nt, Artificial Sequence
  Description of Artificial Sequence: Synthetic oligonucleotide
cagcccauguuucauucauaugguauc

SEQ ID NO: 165510 - RNA, 27 nt, Artificial Sequence
  Description of Artificial Sequence: Synthetic oligonucleotide
uaugaaaaaguuggauaagaaaguugg

SEQ ID NO: 165511 - RNA, 27 nt, Artificial Sequence
  Description of Artificial Sequence: Synthetic oligonucleotide
uccggccucaugaugucaugcaaggcu

SEQ ID NO: 165512 - RNA, 27 nt, Artificial Sequence
  Description of Artificial Sequence: Synthetic oligonucleotide
acaaaugcagucauauacaaauucagg

SEQ ID NO: 165513 - RNA, 27 nt, Artificial Sequence
  Description of Artificial Sequence: Synthetic oligonucleotide
gguaguaaacauucuacuaggauucuu

SEQ ID NO: 165514 - RNA, 27 nt, Artificial Sequence
  Description of Artificial Sequence: Synthetic oligonucleotide
uuucaucaaaaaauucuucccuuucug

SEQ ID NO: 165515 - RNA, 27 nt, Artificial Sequence
  Description of Artificial Sequence: Synthetic oligonucleotide
aaauucacacacuggcaugccgauagc

SEQ ID NO: 165516 - RNA, 27 nt, Artificial Sequence
  Description of Artificial Sequence: Synthetic oligonucleotide
acauacauugcucuacuaugaggugaa

SEQ ID NO: 165517 - RNA, 27 nt, Artificial Sequence
  Description of Artificial Sequence: Synthetic oligonucleotide
uauauaugugcuuuggcaauucuggug

SEQ ID NO: 165518 - RNA, 27 nt, Artificial Sequence
  Description of Artificial Sequence: Synthetic oligonucleotide
ggagaaacuauuacccagaucaccacu

SEQ ID NO: 165519 - RNA, 27 nt, Artificial Sequence
  Description of Artificial Sequence: Synthetic oligonucleotide
auuuggagaaacuauuacccagaucac

SEQ ID NO: 165520 - RNA, 27 nt, Artificial Sequence
  Description of Artificial Sequence: Synthetic oligonucleotide
uuucuaggaaguauucaucacauccac

SEQ ID NO: 165521 - RNA, 27 nt, Artificial Sequence
  Description of Artificial Sequence: Synthetic oligonucleotide
cauauaugguguagcuguggaaaugcg

SEQ ID NO: 165522 - RNA, 27 nt, Artificial Sequence
  Description of Artificial Sequence: Synthetic oligonucleotide
cuccauucauauaugguguagcugugg

SEQ ID NO: 165523 - RNA, 27 nt, Artificial Sequence
  Description of Artificial Sequence: Synthetic oligonucleotide
aucuucuucucguguaagaacugcagc

SEQ ID NO: 165524 - RNA, 27 nt, Artificial Sequence
  Description of Artificial Sequence: Synthetic oligonucleotide
ucccuguaaaugaucuucuucucgugu

SEQ ID NO: 165525 - RNA, 27 nt, Artificial Sequence
  Description of Artificial Sequence: Synthetic oligonucleotide
gucccuguaaaugaucuucuucucgug

SEQ ID NO: 165526 - RNA, 27 nt, Artificial Sequence
  Description of Artificial Sequence: Synthetic oligonucleotide
ucaggucccuguaaaugaucuucuucu

SEQ ID NO: 165527 - RNA, 27 nt, Artificial Sequence
  Description of Artificial Sequence: Synthetic oligonucleotide
gaugcagucaaacaccucuuccucugu

SEQ ID NO: 165528 - RNA, 27 nt, Artificial Sequence
  Description of Artificial Sequence: Synthetic oligonucleotide
cgaugcagucaaacaccucuuccucug

SEQ ID NO: 165529 - RNA, 27 nt, Artificial Sequence
  Description of Artificial Sequence: Synthetic oligonucleotide
cccugugaacucgcccucaaaguagcg

SEQ ID NO: 165530 - RNA, 27 nt, Artificial Sequence
  Description of Artificial Sequence: Synthetic oligonucleotide
ggacagaggugccaggagaugcccuca

SEQ ID NO: 165531 - RNA, 27 nt, Artificial Sequence
  Description of Artificial Sequence: Synthetic oligonucleotide
uuaaaaagacaaaccauaucacuccuu

SEQ ID NO: 165532 - RNA, 27 nt, Artificial Sequence
  Description of Artificial Sequence: Synthetic oligonucleotide
cuuaaaaagacaaaccauaucacuccu

SEQ ID NO: 165533 - RNA, 27 nt, Artificial Sequence
  Description of Artificial Sequence: Synthetic oligonucleotide
gacaaccuuuaggaucuuuacugcaac

SEQ ID NO: 165534 - RNA, 27 nt, Artificial Sequence
  Description of Artificial Sequence: Synthetic oligonucleotide
gucgacaaccuuuaggaucuuuacugc

SEQ ID NO: 165535 - RNA, 27 nt, Artificial Sequence
  Description of Artificial Sequence: Synthetic oligonucleotide
acaauugccagguuguccuuugucaug

SEQ ID NO: 165536 - RNA, 27 nt, Artificial Sequence
  Description of Artificial Sequence: Synthetic oligonucleotide
ccucgcaccacugggucacaauugcca

SEQ ID NO: 165537 - RNA, 27 nt, Artificial Sequence
  Description of Artificial Sequence: Synthetic oligonucleotide
auuucaugucucuauggaugauguucu

SEQ ID NO: 165538 - RNA, 27 nt, Artificial Sequence
  Description of Artificial Sequence: Synthetic oligonucleotide
uggagaaauauauuguuggauuucaug

SEQ ID NO: 165539 - RNA, 27 nt, Artificial Sequence
  Description of Artificial Sequence: Synthetic oligonucleotide
agccuucauggagaaauauauuguugg

SEQ ID NO: 165540 - RNA, 27 nt, Artificial Sequence
  Description of Artificial Sequence: Synthetic oligonucleotide
accacuccagcgugacuuuacuguugc

SEQ ID NO: 165541 - RNA, 27 nt, Artificial Sequence
  Description of Artificial Sequence: Synthetic oligonucleotide
ccucucuuccuuuacuuucuucacaca

SEQ ID NO: 165542 - RNA, 27 nt, Artificial Sequence
  Description of Artificial Sequence: Synthetic oligonucleotide
gcccgaugcaaggauggcucggaagcg

SEQ ID NO: 165543 - RNA, 27 nt, Artificial Sequence
  Description of Artificial Sequence: Synthetic oligonucleotide
cacaguaggauauucaaccuccauuuc

SEQ ID NO: 165544 - RNA, 27 nt, Artificial Sequence
  Description of Artificial Sequence: Synthetic oligonucleotide
uuacacaguaggauauucaaccuccau

SEQ ID NO: 165545 - RNA, 27 nt, Artificial Sequence
  Description of Artificial Sequence: Synthetic oligonucleotide
uacacuacaagggaaaacucaaaaucu

SEQ ID NO: 165546 - RNA, 27 nt, Artificial Sequence
  Description of Artificial Sequence: Synthetic oligonucleotide
caaucaacaaagaacaaacaggauaaa

SEQ ID NO: 165547 - RNA, 27 nt, Artificial Sequence
  Description of Artificial Sequence: Synthetic oligonucleotide
uuucaaucaacaaagaacaaacaggau

SEQ ID NO: 165548 - RNA, 27 nt, Artificial Sequence
  Description of Artificial Sequence: Synthetic oligonucleotide
auggaagaaaaagaaggcuguagagaa

SEQ ID NO: 165549 - RNA, 27 nt, Artificial Sequence
  Description of Artificial Sequence: Synthetic oligonucleotide
uagaaggaagauuagcuauggaagaaa

SEQ ID NO: 165550 - RNA, 27 nt, Artificial Sequence
  Description of Artificial Sequence: Synthetic oligonucleotide
augaagcauucaacaggaagauuauuu

SEQ ID NO: 165551 - RNA, 27 nt, Artificial Sequence
  Description of Artificial Sequence: Synthetic oligonucleotide
caugaagcauucaacaggaagauuauu

SEQ ID NO: 165552 - RNA, 27 nt, Artificial Sequence
  Description of Artificial Sequence: Synthetic oligonucleotide
ucaaaguagaauucaagucaugaagca

SEQ ID NO: 165553 - RNA, 27 nt, Artificial Sequence
  Description of Artificial Sequence: Synthetic oligonucleotide
gucuguaguugcuucucucccucuuag

SEQ ID NO: 165554 - RNA, 27 nt, Artificial Sequence
  Description of Artificial Sequence: Synthetic oligonucleotide
guugaccuuggucugguaggagacggc

SEQ ID NO: 165555 - RNA, 27 nt, Artificial Sequence
  Description of Artificial Sequence: Synthetic oligonucleotide
gucgagauagucgggccgauugaucuc

SEQ ID NO: 165556 - RNA, 27 nt, Artificial Sequence
  Description of Artificial Sequence: Synthetic oligonucleotide
guuugggaagguuggauguucguccuc

SEQ ID NO: 165557 - RNA, 27 nt, Artificial Sequence
  Description of Artificial Sequence: Synthetic oligonucleotide
aguucuaagcuuggguuccgacccuaa

SEQ ID NO: 165558 - RNA, 27 nt, Artificial Sequence
  Description of Artificial Sequence: Synthetic oligonucleotide
uuaaaguucuaagcuuggguuccgacc

SEQ ID NO: 165559 - RNA, 27 nt, Artificial Sequence
  Description of Artificial Sequence: Synthetic oligonucleotide
guugcuuaaaguucuaagcuuggguuc

SEQ ID NO: 165560 - RNA, 27 nt, Artificial Sequence
  Description of Artificial Sequence: Synthetic oligonucleotide
gugguggucuuguugcuuaaaguucua

SEQ ID NO: 165561 - RNA, 27 nt, Artificial Sequence
  Description of Artificial Sequence: Synthetic oligonucleotide
acuuuauuucucgccacugaauaguag

SEQ ID NO: 165562 - RNA, 27 nt, Artificial Sequence
  Description of Artificial Sequence: Synthetic oligonucleotide
aacuuuauuucucgccacugaauagua

SEQ ID NO: 165563 - RNA, 27 nt, Artificial Sequence
  Description of Artificial Sequence: Synthetic oligonucleotide
ggaucauuuccuguuaucuguguuugu

SEQ ID NO: 165564 - RNA, 27 nt, Artificial Sequence
  Description of Artificial Sequence: Synthetic oligonucleotide
guuucauuucuucucuuuucuuaaggc

SEQ ID NO: 165565 - RNA, 27 nt, Artificial Sequence
  Description of Artificial Sequence: Synthetic oligonucleotide
ggaggauggaaacacacuccuucaguu

SEQ ID NO: 165566 - RNA, 27 nt, Artificial Sequence
  Description of Artificial Sequence: Synthetic oligonucleotide
ucaaagauuuucagucccgcggugaca

SEQ ID NO: 165567 - RNA, 27 nt, Artificial Sequence
  Description of Artificial Sequence: Synthetic oligonucleotide
ccugaacggcacgcuuauuucugcugu

SEQ ID NO: 165568 - RNA, 27 nt, Artificial Sequence
  Description of Artificial Sequence: Synthetic oligonucleotide
cuucuggacccugaacggcacgcuuau

SEQ ID NO: 165569 - RNA, 27 nt, Artificial Sequence
  Description of Artificial Sequence: Synthetic oligonucleotide
caagcagucuugagugacuguuucuuc

SEQ ID NO: 165570 - RNA, 27 nt, Artificial Sequence
  Description of Artificial Sequence: Synthetic oligonucleotide
ccaaagacauggaccuucuuccucuga

SEQ ID NO: 165571 - RNA, 27 nt, Artificial Sequence
  Description of Artificial Sequence: Synthetic oligonucleotide
guguuucaggcauauuuugaauacauc

SEQ ID NO: 165572 - RNA, 27 nt, Artificial Sequence
  Description of Artificial Sequence: Synthetic oligonucleotide
gagguacagagaaagggaggaaaauag

SEQ ID NO: 165573 - RNA, 27 nt, Artificial Sequence
  Description of Artificial Sequence: Synthetic oligonucleotide
ucuugucuugcucuaucuuucuuuggu

SEQ ID NO: 165574 - RNA, 27 nt, Artificial Sequence
  Description of Artificial Sequence: Synthetic oligonucleotide
uuucuugucuugcucuaucuuucuuug

SEQ ID NO: 165575 - RNA, 27 nt, Artificial Sequence
  Description of Artificial Sequence: Synthetic oligonucleotide
ggaucuuguacaaacaaaugcuuucuc

SEQ ID NO: 165576 - RNA, 27 nt, Artificial Sequence
  Description of Artificial Sequence: Synthetic oligonucleotide
ucugcaaguacguucguuuaacucaag

SEQ ID NO: 165577 - RNA, 27 nt, Artificial Sequence
  Description of Artificial Sequence: Synthetic oligonucleotide
ucuguaucgaucguucuguaucagucu

SEQ ID NO: 165578 - RNA, 27 nt, Artificial Sequence
  Description of Artificial Sequence: Synthetic oligonucleotide
auuuauuuuuauauauauauaauauau

SEQ ID NO: 165579 - RNA, 27 nt, Artificial Sequence
  Description of Artificial Sequence: Synthetic oligonucleotide
auauuuauuuuuauauauauauaauau

SEQ ID NO: 165580 - RNA, 27 nt, Artificial Sequence
  Description of Artificial Sequence: Synthetic oligonucleotide
cacagcagucaaauacauccagugaag

SEQ ID NO: 165581 - RNA, 27 nt, Artificial Sequence
  Description of Artificial Sequence: Synthetic oligonucleotide
gucucucaucuccuccucuucccuguc

SEQ ID NO: 165582 - RNA, 27 nt, Artificial Sequence
  Description of Artificial Sequence: Synthetic oligonucleotide
ccaagugggacaaaaaaaagaucaugc

SEQ ID NO: 165583 - RNA, 14 nt, Artificial Sequence
  Description of Artificial Sequence: Synthetic oligonucleotide
guauuuugaugagg

SEQ ID NO: 165584 - RNA, 12 nt, Artificial Sequence
  Description of Artificial Sequence: Synthetic oligonucleotide
ggcccagaugau

SEQ ID NO: 165585 - RNA, 14 nt, Artificial Sequence
  Description of Artificial Sequence: Synthetic oligonucleotide
gggaagaaaacuau

SEQ ID NO: 165586 - RNA, 15 nt, Artificial Sequence
  Description of Artificial Sequence: Synthetic oligonucleotide
guuuuaauuuauuuc

SEQ ID NO: 165587 - RNA, 12 nt, Artificial Sequence
  Description of Artificial Sequence: Synthetic oligonucleotide
acguagggaaau

SEQ ID NO: 165588 - RNA, 12 nt, Artificial Sequence
  Description of Artificial Sequence: Synthetic oligonucleotide
ccaggguuuacc

SEQ ID NO: 165589 - RNA, 11 nt, Artificial Sequence
  Description of Artificial Sequence: Synthetic oligonucleotide
agcaagguuua

SEQ ID NO: 165590 - RNA, 12 nt, Artificial Sequence
  Description of Artificial Sequence: Synthetic oligonucleotide
uguauuauguug

SEQ ID NO: 165591 - RNA, 15 nt, Artificial Sequence
  Description of Artificial Sequence: Synthetic oligonucleotide
uuuuaaucuuuguga

SEQ ID NO: 165592 - RNA, 14 nt, Artificial Sequence
  Description of Artificial Sequence: Synthetic oligonucleotide
uuaaucuuugugac

SEQ ID NO: 165593 - RNA, 13 nt, Artificial Sequence
  Description of Artificial Sequence: Synthetic oligonucleotide
gcugcuuaugucu

SEQ ID NO: 165594 - RNA, 14 nt, Artificial Sequence
  Description of Artificial Sequence: Synthetic oligonucleotide
aaguguuucagaag

SEQ ID NO: 165595 - RNA, 13 nt, Artificial Sequence
  Description of Artificial Sequence: Synthetic oligonucleotide
gaccaucaauaag

SEQ ID NO: 165596 - RNA, 13 nt, Artificial Sequence
  Description of Artificial Sequence: Synthetic oligonucleotide
ccaucaauaagga

SEQ ID NO: 165597 - RNA, 14 nt, Artificial Sequence
  Description of Artificial Sequence: Synthetic oligonucleotide
ucaauaaggaagaa

SEQ ID NO: 165598 - RNA, 14 nt, Artificial Sequence
  Description of Artificial Sequence: Synthetic oligonucleotide
aauaaggaagaagc

SEQ ID NO: 165599 - RNA, 13 nt, Artificial Sequence
  Description of Artificial Sequence: Synthetic oligonucleotide
aggaagaagcccu

SEQ ID NO: 165600 - RNA, 13 nt, Artificial Sequence
  Description of Artificial Sequence: Synthetic oligonucleotide
gcauaacuaaagg

SEQ ID NO: 165601 - RNA, 14 nt, Artificial Sequence
  Description of Artificial Sequence: Synthetic oligonucleotide
cauaacuaaaggug

SEQ ID NO: 165602 - RNA, 12 nt, Artificial Sequence
  Description of Artificial Sequence: Synthetic oligonucleotide
cuacaucacgcc

SEQ ID NO: 165603 - RNA, 12 nt, Artificial Sequence
  Description of Artificial Sequence: Synthetic oligonucleotide
acuggauuuaag

SEQ ID NO: 165604 - RNA, 12 nt, Artificial Sequence
  Description of Artificial Sequence: Synthetic oligonucleotide
cuggauuuaagc

SEQ ID NO: 165605 - RNA, 13 nt, Artificial Sequence
  Description of Artificial Sequence: Synthetic oligonucleotide
gauuuaagcagag

SEQ ID NO: 165606 - RNA, 13 nt, Artificial Sequence
  Description of Artificial Sequence: Synthetic oligonucleotide
auuuaagcagagu

SEQ ID NO: 165607 - RNA, 13 nt, Artificial Sequence
  Description of Artificial Sequence: Synthetic oligonucleotide
uuaagcagaguuc

SEQ ID NO: 165608 - RNA, 13 nt, Artificial Sequence
  Description of Artificial Sequence: Synthetic oligonucleotide
uaagcagaguuca

SEQ ID NO: 165609 - RNA, 14 nt, Artificial Sequence
  Description of Artificial Sequence: Synthetic oligonucleotide
agcagaguucaaaa

SEQ ID NO: 165610 - RNA, 12 nt, Artificial Sequence
  Description of Artificial Sequence: Synthetic oligonucleotide
cucagggucuga

SEQ ID NO: 165611 - RNA, 13 nt, Artificial Sequence
  Description of Artificial Sequence: Synthetic oligonucleotide
caagcaacuacau

SEQ ID NO: 165612 - RNA, 12 nt, Artificial Sequence
  Description of Artificial Sequence: Synthetic oligonucleotide
aucaauggcagc

SEQ ID NO: 165613 - RNA, 11 nt, Artificial Sequence
  Description of Artificial Sequence: Synthetic oligonucleotide
uuccagcccac

SEQ ID NO: 165614 - RNA, 12 nt, Artificial Sequence
  Description of Artificial Sequence: Synthetic oligonucleotide
cagcugagaaug

SEQ ID NO: 165615 - RNA, 13 nt, Artificial Sequence
  Description of Artificial Sequence: Synthetic oligonucleotide
aacguaucuccua

SEQ ID NO: 165616 - RNA, 14 nt, Artificial Sequence
  Description of Artificial Sequence: Synthetic oligonucleotide
ccuaaaauaauuuc

SEQ ID NO: 165617 - RNA, 13 nt, Artificial Sequence
  Description of Artificial Sequence: Synthetic oligonucleotide
uggaagauucagc

SEQ ID NO: 165618 - RNA, 12 nt, Artificial Sequence
  Description of Artificial Sequence: Synthetic oligonucleotide
uuaaacucuccu

SEQ ID NO: 165619 - RNA, 12 nt, Artificial Sequence
  Description of Artificial Sequence: Synthetic oligonucleotide
cagccuacaguu

SEQ ID NO: 165620 - RNA, 13 nt, Artificial Sequence
  Description of Artificial Sequence: Synthetic oligonucleotide
guuauguucaguc

SEQ ID NO: 165621 - RNA, 13 nt, Artificial Sequence
  Description of Artificial Sequence: Synthetic oligonucleotide
cacauacaaaaug

SEQ ID NO: 165622 - RNA, 9 nt, Artificial Sequence
  Description of Artificial Sequence: Synthetic oligonucleotide
uccuuuugc

SEQ ID NO: 165623 - RNA, 12 nt, Artificial Sequence
  Description of Artificial Sequence: Synthetic oligonucleotide
ugaccugugaag

SEQ ID NO: 165624 - RNA, 12 nt, Artificial Sequence
  Description of Artificial Sequence: Synthetic oligonucleotide
cuaucucacaca

SEQ ID NO: 165625 - RNA, 13 nt, Artificial Sequence
  Description of Artificial Sequence: Synthetic oligonucleotide
uguccucaauugu

SEQ ID NO: 165626 - RNA, 12 nt, Artificial Sequence
  Description of Artificial Sequence: Synthetic oligonucleotide
aaaccguagcug

SEQ ID NO: 165627 - RNA, 12 nt, Artificial Sequence
  Description of Artificial Sequence: Synthetic oligonucleotide
uagcuggcaagc

SEQ ID NO: 165628 - RNA, 14 nt, Artificial Sequence
  Description of Artificial Sequence: Synthetic oligonucleotide
uuguaugguuaaaa

SEQ ID NO: 165629 - RNA, 14 nt, Artificial Sequence
  Description of Artificial Sequence: Synthetic oligonucleotide
ugguuaaaagaugg

SEQ ID NO: 165630 - RNA, 13 nt, Artificial Sequence
  Description of Artificial Sequence: Synthetic oligonucleotide
cagggaauuauac

SEQ ID NO: 165631 - RNA, 12 nt, Artificial Sequence
  Description of Artificial Sequence: Synthetic oligonucleotide
acaaucuugcug

SEQ ID NO: 165632 - RNA, 13 nt, Artificial Sequence
  Description of Artificial Sequence: Synthetic oligonucleotide
ccaauaaugaaga

SEQ ID NO: 165633 - RNA, 13 nt, Artificial Sequence
  Description of Artificial Sequence: Synthetic oligonucleotide
acuuuggauguuc

SEQ ID NO: 165634 - RNA, 12 nt, Artificial Sequence
  Description of Artificial Sequence: Synthetic oligonucleotide
aaugcuuccacu

SEQ ID NO: 165635 - RNA, 11 nt, Artificial Sequence
  Description of Artificial Sequence: Synthetic oligonucleotide
gagaaaguuug

SEQ ID NO: 165636 - RNA, 11 nt, Artificial Sequence
  Description of Artificial Sequence: Synthetic oligonucleotide
aaagaacuacu

SEQ ID NO: 165637 - RNA, 12 nt, Artificial Sequence
  Description of Artificial Sequence: Synthetic oligonucleotide
uuagaaauacgg

SEQ ID NO: 165638 - RNA, 12 nt, Artificial Sequence
  Description of Artificial Sequence: Synthetic oligonucleotide
aacauggguaca

SEQ ID NO: 165639 - RNA, 14 nt, Artificial Sequence
  Description of Artificial Sequence: Synthetic oligonucleotide
aaagacacagaaga

SEQ ID NO: 165640 - RNA, 11 nt, Artificial Sequence
  Description of Artificial Sequence: Synthetic oligonucleotide
uaguagggagg

SEQ ID NO: 165641 - RNA, 12 nt, Artificial Sequence
  Description of Artificial Sequence: Synthetic oligonucleotide
gccuucugcagc

SEQ ID NO: 165642 - RNA, 10 nt, Artificial Sequence
  Description of Artificial Sequence: Synthetic oligonucleotide
ggucugguac

SEQ ID NO: 165643 - RNA, 12 nt, Artificial Sequence
  Description of Artificial Sequence: Synthetic oligonucleotide
cuaguccuuccg

SEQ ID NO: 165644 - RNA, 12 nt, Artificial Sequence
  Description of Artificial Sequence: Synthetic oligonucleotide
ccagugaauauu

SEQ ID NO: 165645 - RNA, 13 nt, Artificial Sequence
  Description of Artificial Sequence: Synthetic oligonucleotide
augaauucaaguu

SEQ ID NO: 165646 - RNA, 12 nt, Artificial Sequence
  Description of Artificial Sequence: Synthetic oligonucleotide
caggacacagau

SEQ ID NO: 165647 - RNA, 12 nt, Artificial Sequence
  Description of Artificial Sequence: Synthetic oligonucleotide
cucaaagcacag

SEQ ID NO: 165648 - RNA, 10 nt, Artificial Sequence
  Description of Artificial Sequence: Synthetic oligonucleotide
accacugcca

SEQ ID NO: 165649 - RNA, 13 nt, Artificial Sequence
  Description of Artificial Sequence: Synthetic oligonucleotide
gaaacuacuagug

SEQ ID NO: 165650 - RNA, 12 nt, Artificial Sequence
  Description of Artificial Sequence: Synthetic oligonucleotide
aagucggacagc

SEQ ID NO: 165651 - RNA, 13 nt, Artificial Sequence
  Description of Artificial Sequence: Synthetic oligonucleotide
gaaagcgaaaaau

SEQ ID NO: 165652 - RNA, 13 nt, Artificial Sequence
  Description of Artificial Sequence: Synthetic oligonucleotide
cccucugauuuag

SEQ ID NO: 165653 - RNA, 12 nt, Artificial Sequence
  Description of Artificial Sequence: Synthetic oligonucleotide
ugagcuauuuaa

SEQ ID NO: 165654 - RNA, 13 nt, Artificial Sequence
  Description of Artificial Sequence: Synthetic oligonucleotide
aaaaggugaaaaa

SEQ ID NO: 165655 - RNA, 14 nt, Artificial Sequence
  Description of Artificial Sequence: Synthetic oligonucleotide
gaaaaagcacuauu

SEQ ID NO: 165656 - RNA, 12 nt, Artificial Sequence
  Description of Artificial Sequence: Synthetic oligonucleotide
ggcugaaaagaa

SEQ ID NO: 165657 - RNA, 12 nt, Artificial Sequence
  Description of Artificial Sequence: Synthetic oligonucleotide
uaaacccuuaua

SEQ ID NO: 165658 - RNA, 13 nt, Artificial Sequence
  Description of Artificial Sequence: Synthetic oligonucleotide
cauacuauuagcc

SEQ ID NO: 165659 - RNA, 12 nt, Artificial Sequence
  Description of Artificial Sequence: Synthetic oligonucleotide
gacagaagcauu

SEQ ID NO: 165660 - RNA, 14 nt, Artificial Sequence
  Description of Artificial Sequence: Synthetic oligonucleotide
agagcaaauaagau

SEQ ID NO: 165661 - RNA, 14 nt, Artificial Sequence
  Description of Artificial Sequence: Synthetic oligonucleotide
ccaacauuuuucuc

SEQ ID NO: 165662 - RNA, 15 nt, Artificial Sequence
  Description of Artificial Sequence: Synthetic oligonucleotide
uuaaguaugagaaaa

SEQ ID NO: 165663 - RNA, 14 nt, Artificial Sequence
  Description of Artificial Sequence: Synthetic oligonucleotide
caggaauaaagaug

SEQ ID NO: 165664 - RNA, 13 nt, Artificial Sequence
  Description of Artificial Sequence: Synthetic oligonucleotide
aauuugaaugacc

SEQ ID NO: 165665 - RNA, 14 nt, Artificial Sequence
  Description of Artificial Sequence: Synthetic oligonucleotide
auguauaaagauag

SEQ ID NO: 165666 - RNA, 12 nt, Artificial Sequence
  Description of Artificial Sequence: Synthetic oligonucleotide
ggcuguaacuau

SEQ ID NO: 165667 - RNA, 11 nt, Artificial Sequence
  Description of Artificial Sequence: Synthetic oligonucleotide
ucugugaagug

SEQ ID NO: 165668 - RNA, 14 nt, Artificial Sequence
  Description of Artificial Sequence: Synthetic oligonucleotide
ccuuuaaggaaaug

SEQ ID NO: 165669 - RNA, 13 nt, Artificial Sequence
  Description of Artificial Sequence: Synthetic oligonucleotide
aaggauacaaaaa

SEQ ID NO: 165670 - RNA, 12 nt, Artificial Sequence
  Description of Artificial Sequence: Synthetic oligonucleotide
agaugcaauuug

SEQ ID NO: 165671 - RNA, 12 nt, Artificial Sequence
  Description of Artificial Sequence: Synthetic oligonucleotide
guucaaaacgaa

SEQ ID NO: 165672 - RNA, 11 nt, Artificial Sequence
  Description of Artificial Sequence: Synthetic oligonucleotide
gugaaaccuca

SEQ ID NO: 165673 - RNA, 13 nt, Artificial Sequence
  Description of Artificial Sequence: Synthetic oligonucleotide
acgaaagagaagc

SEQ ID NO: 165674 - RNA, 12 nt, Artificial Sequence
  Description of Artificial Sequence: Synthetic oligonucleotide
cuccacaagcgc

SEQ ID NO: 165675 - RNA, 14 nt, Artificial Sequence
  Description of Artificial Sequence: Synthetic oligonucleotide
gagaagauuccaaa

SEQ ID NO: 165676 - RNA, 13 nt, Artificial Sequence
  Description of Artificial Sequence: Synthetic oligonucleotide
aaucuggauucaa

SEQ ID NO: 165677 - RNA, 13 nt, Artificial Sequence
  Description of Artificial Sequence: Synthetic oligonucleotide
agaacagauuuga

SEQ ID NO: 165678 - RNA, 11 nt, Artificial Sequence
  Description of Artificial Sequence: Synthetic oligonucleotide
ccagagcugug

SEQ ID NO: 165679 - RNA, 12 nt, Artificial Sequence
  Description of Artificial Sequence: Synthetic oligonucleotide
ccucagauuguu

SEQ ID NO: 165680 - RNA, 12 nt, Artificial Sequence
  Description of Artificial Sequence: Synthetic oligonucleotide
cuauuuuaauua

SEQ ID NO: 165681 - RNA, 13 nt, Artificial Sequence
  Description of Artificial Sequence: Synthetic oligonucleotide
uuuaauuuauuaa

SEQ ID NO: 165682 - RNA, 12 nt, Artificial Sequence
  Description of Artificial Sequence: Synthetic oligonucleotide
augcaguuugaa

SEQ ID NO: 165683 - RNA, 11 nt, Artificial Sequence
  Description of Artificial Sequence: Synthetic oligonucleotide
caugcugcugg

SEQ ID NO: 165684 - RNA, 13 nt, Artificial Sequence
  Description of Artificial Sequence: Synthetic oligonucleotide
agaugugcauuuc

SEQ ID NO: 165685 - RNA, 12 nt, Artificial Sequence
  Description of Artificial Sequence: Synthetic oligonucleotide
ucaaaaccugug

SEQ ID NO: 165686 - RNA, 11 nt, Artificial Sequence
  Description of Artificial Sequence: Synthetic oligonucleotide
gaaugugggua

SEQ ID NO: 165687 - RNA, 10 nt, Artificial Sequence
  Description of Artificial Sequence: Synthetic oligonucleotide
auguggguag

SEQ ID NO: 165688 - RNA, 13 nt, Artificial Sequence
  Description of Artificial Sequence: Synthetic oligonucleotide
ugaaaaugagcau

SEQ ID NO: 165689 - RNA, 13 nt, Artificial Sequence
  Description of Artificial Sequence: Synthetic oligonucleotide
uugcuuuucaugu

SEQ ID NO: 165690 - RNA, 12 nt, Artificial Sequence
  Description of Artificial Sequence: Synthetic oligonucleotide
uguauuucuaua

SEQ ID NO: 165691 - RNA, 13 nt, Artificial Sequence
  Description of Artificial Sequence: Synthetic oligonucleotide
uuugauuaauguu

SEQ ID NO: 165692 - RNA, 12 nt, Artificial Sequence
  Description of Artificial Sequence: Synthetic oligonucleotide
caacguguauag

SEQ ID NO: 165693 - RNA, 12 nt, Artificial Sequence
  Description of Artificial Sequence: Synthetic oligonucleotide
cauauccuuggc

SEQ ID NO: 165694 - RNA, 13 nt, Artificial Sequence
  Description of Artificial Sequence: Synthetic oligonucleotide
uacuaacaucugg

SEQ ID NO: 165695 - RNA, 11 nt, Artificial Sequence
  Description of Artificial Sequence: Synthetic oligonucleotide
cauaaguugug

SEQ ID NO: 165696 - RNA, 12 nt, Artificial Sequence
  Description of Artificial Sequence: Synthetic oligonucleotide
gcaucauuuugg

SEQ ID NO: 165697 - RNA, 10 nt, Artificial Sequence
  Description of Artificial Sequence: Synthetic oligonucleotide
gcucuucuua

SEQ ID NO: 165698 - RNA, 10 nt, Artificial Sequence
  Description of Artificial Sequence: Synthetic oligonucleotide
agauuagguc

SEQ ID NO: 165699 - RNA, 12 nt, Artificial Sequence
  Description of Artificial Sequence: Synthetic oligonucleotide
auggaauugaaa

SEQ ID NO: 165700 - RNA, 13 nt, Artificial Sequence
  Description of Artificial Sequence: Synthetic oligonucleotide
cacacucauuccu

SEQ ID NO: 165701 - RNA, 12 nt, Artificial Sequence
  Description of Artificial Sequence: Synthetic oligonucleotide
uguagagguaac

SEQ ID NO: 165702 - RNA, 11 nt, Artificial Sequence
  Description of Artificial Sequence: Synthetic oligonucleotide
caaccacaugc

SEQ ID NO: 165703 - RNA, 12 nt, Artificial Sequence
  Description of Artificial Sequence: Synthetic oligonucleotide
ucggaaacaagu

SEQ ID NO: 165704 - RNA, 11 nt, Artificial Sequence
  Description of Artificial Sequence: Synthetic oligonucleotide
acucccaauaa

SEQ ID NO: 165705 - RNA, 13 nt, Artificial Sequence
  Description of Artificial Sequence: Synthetic oligonucleotide
aaugcuaagaaau

SEQ ID NO: 165706 - RNA, 11 nt, Artificial Sequence
  Description of Artificial Sequence: Synthetic oligonucleotide
gucuuucucua

SEQ ID NO: 165707 - RNA, 11 nt, Artificial Sequence
  Description of Artificial Sequence: Synthetic oligonucleotide
ugaauuucagg

SEQ ID NO: 165708 - RNA, 13 nt, Artificial Sequence
  Description of Artificial Sequence: Synthetic oligonucleotide
cgauucccucuca

SEQ ID NO: 165709 - RNA, 11 nt, Artificial Sequence
  Description of Artificial Sequence: Synthetic oligonucleotide
aggaaagugaa

SEQ ID NO: 165710 - RNA, 12 nt, Artificial Sequence
  Description of Artificial Sequence: Synthetic oligonucleotide
gaggcugcaugc

SEQ ID NO: 165711 - RNA, 11 nt, Artificial Sequence
  Description of Artificial Sequence: Synthetic oligonucleotide
ucucugaacag

SEQ ID NO: 165712 - RNA, 12 nt, Artificial Sequence
  Description of Artificial Sequence: Synthetic oligonucleotide
aacuuggcugua

SEQ ID NO: 165713 - RNA, 12 nt, Artificial Sequence
  Description of Artificial Sequence: Synthetic oligonucleotide
agaagccaaaau

SEQ ID NO: 165714 - RNA, 14 nt, Artificial Sequence
  Description of Artificial Sequence: Synthetic oligonucleotide
auuaaaagaagucc

SEQ ID NO: 165715 - RNA, 14 nt, Artificial Sequence
  Description of Artificial Sequence: Synthetic oligonucleotide
gaauccggauuauc

SEQ ID NO: 165716 - RNA, 12 nt, Artificial Sequence
  Description of Artificial Sequence: Synthetic oligonucleotide
aaugugacauca

SEQ ID NO: 165717 - RNA, 13 nt, Artificial Sequence
  Description of Artificial Sequence: Synthetic oligonucleotide
caucaaagcaagu

SEQ ID NO: 165718 - RNA, 11 nt, Artificial Sequence
  Description of Artificial Sequence: Synthetic oligonucleotide
agagagagaaa

SEQ ID NO: 165719 - RNA, 13 nt, Artificial Sequence
  Description of Artificial Sequence: Synthetic oligonucleotide
ucgcuguaguauu

SEQ ID NO: 165720 - RNA, 14 nt, Artificial Sequence
  Description of Artificial Sequence: Synthetic oligonucleotide
cgcuguaguauuua

SEQ ID NO: 165721 - RNA, 13 nt, Artificial Sequence
  Description of Artificial Sequence: Synthetic oligonucleotide
auuuaagcccaua

SEQ ID NO: 165722 - RNA, 15 nt, Artificial Sequence
  Description of Artificial Sequence: Synthetic oligonucleotide
auuaaaauaaacaug

SEQ ID NO: 165723 - RNA, 12 nt, Artificial Sequence
  Description of Artificial Sequence: Synthetic oligonucleotide
cuguucugaucg

SEQ ID NO: 165724 - RNA, 16 nt, Artificial Sequence
  Description of Artificial Sequence: Synthetic oligonucleotide
aaauaauuugaacuuu

SEQ ID NO: 165725 - RNA, 12 nt, Artificial Sequence
  Description of Artificial Sequence: Synthetic oligonucleotide
ugcgaccuuaau

SEQ ID NO: 165726 - RNA, 11 nt, Artificial Sequence
  Description of Artificial Sequence: Synthetic oligonucleotide
cugagaaagcu

SEQ ID NO: 165727 - RNA, 13 nt, Artificial Sequence
  Description of Artificial Sequence: Synthetic oligonucleotide
aguaaagaugcua

SEQ ID NO: 165728 - RNA, 12 nt, Artificial Sequence
  Description of Artificial Sequence: Synthetic oligonucleotide
cugcuuaauugc

SEQ ID NO: 165729 - RNA, 14 nt, Artificial Sequence
  Description of Artificial Sequence: Synthetic oligonucleotide
uaccauaugaauga

SEQ ID NO: 165730 - RNA, 12 nt, Artificial Sequence
  Description of Artificial Sequence: Synthetic oligonucleotide
aacuuucuuauc

SEQ ID NO: 165731 - RNA, 13 nt, Artificial Sequence
  Description of Artificial Sequence: Synthetic oligonucleotide
ccuugcaugacau

SEQ ID NO: 165732 - RNA, 14 nt, Artificial Sequence
  Description of Artificial Sequence: Synthetic oligonucleotide
ugaauuuguauaug

SEQ ID NO: 165733 - RNA, 12 nt, Artificial Sequence
  Description of Artificial Sequence: Synthetic oligonucleotide
gaauccuaguag

SEQ ID NO: 165734 - RNA, 10 nt, Artificial Sequence
  Description of Artificial Sequence: Synthetic oligonucleotide
gaaagggaag

SEQ ID NO: 165735 - RNA, 11 nt, Artificial Sequence
  Description of Artificial Sequence: Synthetic oligonucleotide
uaucggcaugc

SEQ ID NO: 165736 - RNA, 12 nt, Artificial Sequence
  Description of Artificial Sequence: Synthetic oligonucleotide
caccucauagua

SEQ ID NO: 165737 - RNA, 11 nt, Artificial Sequence
  Description of Artificial Sequence: Synthetic oligonucleotide
ccagaauugcc

SEQ ID NO: 165738 - RNA, 11 nt, Artificial Sequence
  Description of Artificial Sequence: Synthetic oligonucleotide
uggugaucugg

SEQ ID NO: 165739 - RNA, 12 nt, Artificial Sequence
  Description of Artificial Sequence: Synthetic oligonucleotide
gaucuggguaau

SEQ ID NO: 165740 - RNA, 12 nt, Artificial Sequence
  Description of Artificial Sequence: Synthetic oligonucleotide
ggaugugaugaa

SEQ ID NO: 165741 - RNA, 12 nt, Artificial Sequence
  Description of Artificial Sequence: Synthetic oligonucleotide
cauuuccacagc

SEQ ID NO: 165742 - RNA, 11 nt, Artificial Sequence
  Description of Artificial Sequence: Synthetic oligonucleotide
acagcuacacc

SEQ ID NO: 165743 - RNA, 12 nt, Artificial Sequence
  Description of Artificial Sequence: Synthetic oligonucleotide
ugcaguucuuac

SEQ ID NO: 165744 - RNA, 12 nt, Artificial Sequence
  Description of Artificial Sequence: Synthetic oligonucleotide
acgagaagaaga

SEQ ID NO: 165745 - RNA, 12 nt, Artificial Sequence
  Description of Artificial Sequence: Synthetic oligonucleotide
cgagaagaagau

SEQ ID NO: 165746 - RNA, 15 nt, Artificial Sequence
  Description of Artificial Sequence: Synthetic oligonucleotide
aagaagaucauuuac

SEQ ID NO: 165747 - RNA, 11 nt, Artificial Sequence
  Description of Artificial Sequence: Synthetic oligonucleotide
agaggaagagg

SEQ ID NO: 165748 - RNA, 12 nt, Artificial Sequence
  Description of Artificial Sequence: Synthetic oligonucleotide
gaggaagaggug

SEQ ID NO: 165749 - RNA, 13 nt, Artificial Sequence
  Description of Artificial Sequence: Synthetic oligonucleotide
cuacuuugagggc

SEQ ID NO: 165750 - RNA, 12 nt, Artificial Sequence
  Description of Artificial Sequence: Synthetic oligonucleotide
agggcaucuccu

SEQ ID NO: 165751 - RNA, 10 nt, Artificial Sequence
  Description of Artificial Sequence: Synthetic oligonucleotide
ggagugauau

SEQ ID NO: 165752 - RNA, 11 nt, Artificial Sequence
  Description of Artificial Sequence: Synthetic oligonucleotide
gagugauaugg

SEQ ID NO: 165753 - RNA, 12 nt, Artificial Sequence
  Description of Artificial Sequence: Synthetic oligonucleotide
ugcaguaaagau

SEQ ID NO: 165754 - RNA, 13 nt, Artificial Sequence
  Description of Artificial Sequence: Synthetic oligonucleotide
aguaaagauccua

SEQ ID NO: 165755 - RNA, 12 nt, Artificial Sequence
  Description of Artificial Sequence: Synthetic oligonucleotide
ugacaaaggaca

SEQ ID NO: 165756 - RNA, 13 nt, Artificial Sequence
  Description of Artificial Sequence: Synthetic oligonucleotide
gcaauugugaccc

SEQ ID NO: 165757 - RNA, 12 nt, Artificial Sequence
  Description of Artificial Sequence: Synthetic oligonucleotide
aacaucauccau

SEQ ID NO: 165758 - RNA, 12 nt, Artificial Sequence
  Description of Artificial Sequence: Synthetic oligonucleotide
ugaaauccaaca

SEQ ID NO: 165759 - RNA, 15 nt, Artificial Sequence
  Description of Artificial Sequence: Synthetic oligonucleotide
aacaauauauuucuc

SEQ ID NO: 165760 - RNA, 14 nt, Artificial Sequence
  Description of Artificial Sequence: Synthetic oligonucleotide
aacaguaaagucac

SEQ ID NO: 165761 - RNA, 14 nt, Artificial Sequence
  Description of Artificial Sequence: Synthetic oligonucleotide
ugugaagaaaguaa

SEQ ID NO: 165762 - RNA, 13 nt, Artificial Sequence
  Description of Artificial Sequence: Synthetic oligonucleotide
cuuccgagccauc

SEQ ID NO: 165763 - RNA, 12 nt, Artificial Sequence
  Description of Artificial Sequence: Synthetic oligonucleotide
aauggagguuga

SEQ ID NO: 165764 - RNA, 12 nt, Artificial Sequence
  Description of Artificial Sequence: Synthetic oligonucleotide
ggagguugaaua

SEQ ID NO: 165765 - RNA, 13 nt, Artificial Sequence
  Description of Artificial Sequence: Synthetic oligonucleotide
auuuugaguuuuc

SEQ ID NO: 165766 - RNA, 12 nt, Artificial Sequence
  Description of Artificial Sequence: Synthetic oligonucleotide
uauccuguuugu

SEQ ID NO: 165767 - RNA, 11 nt, Artificial Sequence
  Description of Artificial Sequence: Synthetic oligonucleotide
ccuguuuguuc

SEQ ID NO: 165768 - RNA, 10 nt, Artificial Sequence
  Description of Artificial Sequence: Synthetic oligonucleotide
cucuacagcc

SEQ ID NO: 165769 - RNA, 12 nt, Artificial Sequence
  Description of Artificial Sequence: Synthetic oligonucleotide
ucuuccauagcu

SEQ ID NO: 165770 - RNA, 12 nt, Artificial Sequence
  Description of Artificial Sequence: Synthetic oligonucleotide
auaaucuuccug

SEQ ID NO: 165771 - RNA, 12 nt, Artificial Sequence
  Description of Artificial Sequence: Synthetic oligonucleotide
uaaucuuccugu

SEQ ID NO: 165772 - RNA, 12 nt, Artificial Sequence
  Description of Artificial Sequence: Synthetic oligonucleotide
cuucaugacuug

SEQ ID NO: 165773 - RNA, 12 nt, Artificial Sequence
  Description of Artificial Sequence: Synthetic oligonucleotide
aagagggagaga

SEQ ID NO: 165774 - RNA, 12 nt, Artificial Sequence
  Description of Artificial Sequence: Synthetic oligonucleotide
cgucuccuacca

SEQ ID NO: 165775 - RNA, 12 nt, Artificial Sequence
  Description of Artificial Sequence: Synthetic oligonucleotide
gaucaaucggcc

SEQ ID NO: 165776 - RNA, 12 nt, Artificial Sequence
  Description of Artificial Sequence: Synthetic oligonucleotide
ggacgaacaucc

SEQ ID NO: 165777 - RNA, 11 nt, Artificial Sequence
  Description of Artificial Sequence: Synthetic oligonucleotide
agggucggaac

SEQ ID NO: 165778 - RNA, 10 nt, Artificial Sequence
  Description of Artificial Sequence: Synthetic oligonucleotide
ucggaaccca

SEQ ID NO: 165779 - RNA, 11 nt, Artificial Sequence
  Description of Artificial Sequence: Synthetic oligonucleotide
acccaagcuua

SEQ ID NO: 165780 - RNA, 14 nt, Artificial Sequence
  Description of Artificial Sequence: Synthetic oligonucleotide
gaacuuuaagcaac

SEQ ID NO: 165781 - RNA, 11 nt, Artificial Sequence
  Description of Artificial Sequence: Synthetic oligonucleotide
acuauucagug

SEQ ID NO: 165782 - RNA, 11 nt, Artificial Sequence
  Description of Artificial Sequence: Synthetic oligonucleotide
cuauucagugg

SEQ ID NO: 165783 - RNA, 13 nt, Artificial Sequence
  Description of Artificial Sequence: Synthetic oligonucleotide
aaacacagauaac

SEQ ID NO: 165784 - RNA, 12 nt, Artificial Sequence
  Description of Artificial Sequence: Synthetic oligonucleotide
cuuaagaaaaga

SEQ ID NO: 165785 - RNA, 12 nt, Artificial Sequence
  Description of Artificial Sequence: Synthetic oligonucleotide
cugaaggagugu

SEQ ID NO: 165786 - RNA, 10 nt, Artificial Sequence
  Description of Artificial Sequence: Synthetic oligonucleotide
ucaccgcggg

SEQ ID NO: 165787 - RNA, 14 nt, Artificial Sequence
  Description of Artificial Sequence: Synthetic oligonucleotide
agcagaaauaagcg

SEQ ID NO: 165788 - RNA, 12 nt, Artificial Sequence
  Description of Artificial Sequence: Synthetic oligonucleotide
aagcgugccguu

SEQ ID NO: 165789 - RNA, 12 nt, Artificial Sequence
  Description of Artificial Sequence: Synthetic oligonucleotide
agaaacagucac

SEQ ID NO: 165790 - RNA, 12 nt, Artificial Sequence
  Description of Artificial Sequence: Synthetic oligonucleotide
agaggaagaagg

SEQ ID NO: 165791 - RNA, 14 nt, Artificial Sequence
  Description of Artificial Sequence: Synthetic oligonucleotide
uguauucaaaauau

SEQ ID NO: 165792 - RNA, 13 nt, Artificial Sequence
  Description of Artificial Sequence: Synthetic oligonucleotide
auuuuccucccuu

SEQ ID NO: 165793 - RNA, 13 nt, Artificial Sequence
  Description of Artificial Sequence: Synthetic oligonucleotide
caaagaaagauag

SEQ ID NO: 165794 - RNA, 12 nt, Artificial Sequence
  Description of Artificial Sequence: Synthetic oligonucleotide
aagaaagauaga

SEQ ID NO: 165795 - RNA, 13 nt, Artificial Sequence
  Description of Artificial Sequence: Synthetic oligonucleotide
gaaagcauuuguu

SEQ ID NO: 165796 - RNA, 13 nt, Artificial Sequence
  Description of Artificial Sequence: Synthetic oligonucleotide
ugaguuaaacgaa

SEQ ID NO: 165797 - RNA, 12 nt, Artificial Sequence
  Description of Artificial Sequence: Synthetic oligonucleotide
acugauacagaa

SEQ ID NO: 165798 - RNA, 12 nt, Artificial Sequence
  Description of Artificial Sequence: Synthetic oligonucleotide
auauuauauaua

SEQ ID NO: 165799 - RNA, 12 nt, Artificial Sequence
  Description of Artificial Sequence: Synthetic oligonucleotide
auuauauauaua

SEQ ID NO: 165800 - RNA, 12 nt, Artificial Sequence
  Description of Artificial Sequence: Synthetic oligonucleotide
ucacuggaugua

SEQ ID NO: 165801 - RNA, 12 nt, Artificial Sequence
  Description of Artificial Sequence: Synthetic oligonucleotide
cagggaagagga

SEQ ID NO: 165802 - RNA, 15 nt, Artificial Sequence
  Description of Artificial Sequence: Synthetic oligonucleotide
augaucuuuuuuuug

SEQ ID NO: 165803 - RNA, 11 nt, Artificial Sequence
  Description of Artificial Sequence: Synthetic oligonucleotide
aguucacggcc

SEQ ID NO: 165804 - RNA, 13 nt, Artificial Sequence
  Description of Artificial Sequence: Synthetic oligonucleotide
caccaucacacca

SEQ ID NO: 165805 - RNA, 11 nt, Artificial Sequence
  Description of Artificial Sequence: Synthetic oligonucleotide
ccugcggguuu

SEQ ID NO: 165806 - RNA, 10 nt, Artificial Sequence
  Description of Artificial Sequence: Synthetic oligonucleotide
auccaguuug

SEQ ID NO: 165807 - RNA, 13 nt, Artificial Sequence
  Description of Artificial Sequence: Synthetic oligonucleotide
guuaaggacuucu

SEQ ID NO: 165808 - RNA, 13 nt, Artificial Sequence
  Description of Artificial Sequence: Synthetic oligonucleotide
cagugggacagag

SEQ ID NO: 165809 - RNA, 14 nt, Artificial Sequence
  Description of Artificial Sequence: Synthetic oligonucleotide
aauuuguuauugug

SEQ ID NO: 165810 - RNA, 13 nt, Artificial Sequence
  Description of Artificial Sequence: Synthetic oligonucleotide
uucaaaugcauuu

SEQ ID NO: 165811 - RNA, 10 nt, Artificial Sequence
  Description of Artificial Sequence: Synthetic oligonucleotide
caggaaagcc

SEQ ID NO: 165812 - RNA, 11 nt, Artificial Sequence
  Description of Artificial Sequence: Synthetic oligonucleotide
aggaaagcccu

SEQ ID NO: 165813 - RNA, 12 nt, Artificial Sequence
  Description of Artificial Sequence: Synthetic oligonucleotide
cccagcauggcc

SEQ ID NO: 165814 - RNA, 11 nt, Artificial Sequence
  Description of Artificial Sequence: Synthetic oligonucleotide
cuucucccuga

SEQ ID NO: 165815 - RNA, 12 nt, Artificial Sequence
  Description of Artificial Sequence: Synthetic oligonucleotide
gaagaagcccuu

SEQ ID NO: 165816 - RNA, 12 nt, Artificial Sequence
  Description of Artificial Sequence: Synthetic oligonucleotide
agaagcccuuca

SEQ ID NO: 165817 - RNA, 11 nt, Artificial Sequence
  Description of Artificial Sequence: Synthetic oligonucleotide
gcccuucagcg

SEQ ID NO: 165818 - RNA, 11 nt, Artificial Sequence
  Description of Artificial Sequence: Synthetic oligonucleotide
ccuucagcggc

SEQ ID NO: 165819 - RNA, 12 nt, Artificial Sequence
  Description of Artificial Sequence: Synthetic oligonucleotide
ucagcggccagu

SEQ ID NO: 165820 - RNA, 12 nt, Artificial Sequence
  Description of Artificial Sequence: Synthetic oligonucleotide
ugaaaagcuccg

SEQ ID NO: 165821 - RNA, 11 nt, Artificial Sequence
  Description of Artificial Sequence: Synthetic oligonucleotide
aaaagcuccgg

SEQ ID NO: 165822 - RNA, 13 nt, Artificial Sequence
  Description of Artificial Sequence: Synthetic oligonucleotide
agucaacagucug

SEQ ID NO: 165823 - RNA, 13 nt, Artificial Sequence
  Description of Artificial Sequence: Synthetic oligonucleotide
cagaguucaaaag

SEQ ID NO: 165824 - RNA, 13 nt, Artificial Sequence
  Description of Artificial Sequence: Synthetic oligonucleotide
agaguucaaaagc

SEQ ID NO: 165825 - RNA, 12 nt, Artificial Sequence
  Description of Artificial Sequence: Synthetic oligonucleotide
uucaaaagcccu

SEQ ID NO: 165826 - RNA, 12 nt, Artificial Sequence
  Description of Artificial Sequence: Synthetic oligonucleotide
ucaaaagcccuu

SEQ ID NO: 165827 - RNA, 12 nt, Artificial Sequence
  Description of Artificial Sequence: Synthetic oligonucleotide
aaaagcccuuca

SEQ ID NO: 165828 - RNA, 12 nt, Artificial Sequence
  Description of Artificial Sequence: Synthetic oligonucleotide
aaagcccuucag

SEQ ID NO: 165829 - RNA, 13 nt, Artificial Sequence
  Description of Artificial Sequence: Synthetic oligonucleotide
gugaagccgcucg

SEQ ID NO: 165830 - RNA, 12 nt, Artificial Sequence
  Description of Artificial Sequence: Synthetic oligonucleotide
cacgccagucaa

SEQ ID NO: 165831 - RNA, 13 nt, Artificial Sequence
  Description of Artificial Sequence: Synthetic oligonucleotide
uucuuggugcgug

SEQ ID NO: 165832 - RNA, 14 nt, Artificial Sequence
  Description of Artificial Sequence: Synthetic oligonucleotide
auuggauucaucag

SEQ ID NO: 165833 - RNA, 13 nt, Artificial Sequence
  Description of Artificial Sequence: Synthetic oligonucleotide
uggaauaccuaag

SEQ ID NO: 165834 - RNA, 12 nt, Artificial Sequence
  Description of Artificial Sequence: Synthetic oligonucleotide
auuugaggcuca

SEQ ID NO: 165835 - RNA, 11 nt, Artificial Sequence
  Description of Artificial Sequence: Synthetic oligonucleotide
ucuacaauugg

SEQ ID NO: 165836 - RNA, 12 nt, Artificial Sequence
  Description of Artificial Sequence: Synthetic oligonucleotide
uaguuaggagcc

SEQ ID NO: 165837 - RNA, 13 nt, Artificial Sequence
  Description of Artificial Sequence: Synthetic oligonucleotide
agucaauauccac

SEQ ID NO: 165838 - RNA, 13 nt, Artificial Sequence
  Description of Artificial Sequence: Synthetic oligonucleotide
auguucagucaca

SEQ ID NO: 165839 - RNA, 12 nt, Artificial Sequence
  Description of Artificial Sequence: Synthetic oligonucleotide
acacacacauac

SEQ ID NO: 165840 - RNA, 12 nt, Artificial Sequence
  Description of Artificial Sequence: Synthetic oligonucleotide
uuccuuuugcuu

SEQ ID NO: 165841 - RNA, 16 nt, Artificial Sequence
  Description of Artificial Sequence: Synthetic oligonucleotide
uuuuaaaguaauuuuu

SEQ ID NO: 165842 - RNA, 13 nt, Artificial Sequence
  Description of Artificial Sequence: Synthetic oligonucleotide
caacagucaaugg

SEQ ID NO: 165843 - RNA, 13 nt, Artificial Sequence
  Description of Artificial Sequence: Synthetic oligonucleotide
ucgacaaaccaau

SEQ ID NO: 165844 - RNA, 12 nt, Artificial Sequence
  Description of Artificial Sequence: Synthetic oligonucleotide
acugcuaccacu

SEQ ID NO: 165845 - RNA, 13 nt, Artificial Sequence
  Description of Artificial Sequence: Synthetic oligonucleotide
gcaagcggucuua

SEQ ID NO: 165846 - RNA, 13 nt, Artificial Sequence
  Description of Artificial Sequence: Synthetic oligonucleotide
ggucuuaccggcu

SEQ ID NO: 165847 - RNA, 11 nt, Artificial Sequence
  Description of Artificial Sequence: Synthetic oligonucleotide
gauggguuacc

SEQ ID NO: 165848 - RNA, 11 nt, Artificial Sequence
  Description of Artificial Sequence: Synthetic oligonucleotide
guuaccugcga

SEQ ID NO: 165849 - RNA, 12 nt, Artificial Sequence
  Description of Artificial Sequence: Synthetic oligonucleotide
aaucuugcugag

SEQ ID NO: 165850 - RNA, 13 nt, Artificial Sequence
  Description of Artificial Sequence: Synthetic oligonucleotide
agcauaaaacagu

SEQ ID NO: 165851 - RNA, 12 nt, Artificial Sequence
  Description of Artificial Sequence: Synthetic oligonucleotide
guccuuuauccu

SEQ ID NO: 165852 - RNA, 12 nt, Artificial Sequence
  Description of Artificial Sequence: Synthetic oligonucleotide
caacgcaaguug

SEQ ID NO: 165853 - RNA, 13 nt, Artificial Sequence
  Description of Artificial Sequence: Synthetic oligonucleotide
aaacugaaaccau

SEQ ID NO: 165854 - RNA, 14 nt, Artificial Sequence
  Description of Artificial Sequence: Synthetic oligonucleotide
acuuuguuaaauau

SEQ ID NO: 165855 - RNA, 14 nt, Artificial Sequence
  Description of Artificial Sequence: Synthetic oligonucleotide
guauauuaaaaguu

SEQ ID NO: 165856 - RNA, 13 nt, Artificial Sequence
  Description of Artificial Sequence: Synthetic oligonucleotide
guuuugacuuaac

SEQ ID NO: 165857 - RNA, 13 nt, Artificial Sequence
  Description of Artificial Sequence: Synthetic oligonucleotide
gcaaacucagcac

SEQ ID NO: 165858 - RNA, 11 nt, Artificial Sequence
  Description of Artificial Sequence: Synthetic oligonucleotide
ugcugaccuca

SEQ ID NO: 165859 - RNA, 14 nt, Artificial Sequence
  Description of Artificial Sequence: Synthetic oligonucleotide
uuuauucagaucgc

SEQ ID NO: 165860 - RNA, 13 nt, Artificial Sequence
  Description of Artificial Sequence: Synthetic oligonucleotide
aggguucugggau

SEQ ID NO: 165861 - RNA, 15 nt, Artificial Sequence
  Description of Artificial Sequence: Synthetic oligonucleotide
auauuggaaauuaug

SEQ ID NO: 165862 - RNA, 13 nt, Artificial Sequence
  Description of Artificial Sequence: Synthetic oligonucleotide
auggaagcacuag

SEQ ID NO: 165863 - RNA, 13 nt, Artificial Sequence
  Description of Artificial Sequence: Synthetic oligonucleotide
guuuuuaugugga

SEQ ID NO: 165864 - RNA, 12 nt, Artificial Sequence
  Description of Artificial Sequence: Synthetic oligonucleotide
ggaauugguaga

SEQ ID NO: 165865 - RNA, 13 nt, Artificial Sequence
  Description of Artificial Sequence: Synthetic oligonucleotide
uuagacuuggaga

SEQ ID NO: 165866 - RNA, 13 nt, Artificial Sequence
  Description of Artificial Sequence: Synthetic oligonucleotide
uuacaguauucca

SEQ ID NO: 165867 - RNA, 15 nt, Artificial Sequence
  Description of Artificial Sequence: Synthetic oligonucleotide
ccacugaugaauuaa

SEQ ID NO: 165868 - RNA, 12 nt, Artificial Sequence
  Description of Artificial Sequence: Synthetic oligonucleotide
ccacaucaucac

SEQ ID NO: 165869 - RNA, 13 nt, Artificial Sequence
  Description of Artificial Sequence: Synthetic oligonucleotide
cucaccaaacaga

SEQ ID NO: 165870 - RNA, 12 nt, Artificial Sequence
  Description of Artificial Sequence: Synthetic oligonucleotide
ggaacaugaugg

SEQ ID NO: 165871 - RNA, 12 nt, Artificial Sequence
  Description of Artificial Sequence: Synthetic oligonucleotide
cauguagacugc

SEQ ID NO: 165872 - RNA, 13 nt, Artificial Sequence
  Description of Artificial Sequence: Synthetic oligonucleotide
ggaucuauuuaug

SEQ ID NO: 165873 - RNA, 12 nt, Artificial Sequence
  Description of Artificial Sequence: Synthetic oligonucleotide
gcacuauuauca

SEQ ID NO: 165874 - RNA, 11 nt, Artificial Sequence
  Description of Artificial Sequence: Synthetic oligonucleotide
aucaguucugc

SEQ ID NO: 165875 - RNA, 13 nt, Artificial Sequence
  Description of Artificial Sequence: Synthetic oligonucleotide
agauuaaaccuac

SEQ ID NO: 165876 - RNA, 13 nt, Artificial Sequence
  Description of Artificial Sequence: Synthetic oligonucleotide
auaaaauccuucu

SEQ ID NO: 165877 - RNA, 12 nt, Artificial Sequence
  Description of Artificial Sequence: Synthetic oligonucleotide
aaugcuguagac

SEQ ID NO: 165878 - RNA, 13 nt, Artificial Sequence
  Description of Artificial Sequence: Synthetic oligonucleotide
uugauaggaauag

SEQ ID NO: 165879 - RNA, 11 nt, Artificial Sequence
  Description of Artificial Sequence: Synthetic oligonucleotide
aauggcccuga

SEQ ID NO: 165880 - RNA, 11 nt, Artificial Sequence
  Description of Artificial Sequence: Synthetic oligonucleotide
uuccucaagca

SEQ ID NO: 165881 - RNA, 10 nt, Artificial Sequence
  Description of Artificial Sequence: Synthetic oligonucleotide
guucagccca

SEQ ID NO: 165882 - RNA, 11 nt, Artificial Sequence
  Description of Artificial Sequence: Synthetic oligonucleotide
gcugcugaacc

SEQ ID NO: 165883 - RNA, 12 nt, Artificial Sequence
  Description of Artificial Sequence: Synthetic oligonucleotide
aaguucucuuca

SEQ ID NO: 165884 - RNA, 11 nt, Artificial Sequence
  Description of Artificial Sequence: Synthetic oligonucleotide
ccagccuagag

SEQ ID NO: 165885 - RNA, 13 nt, Artificial Sequence
  Description of Artificial Sequence: Synthetic oligonucleotide
cucugugaagugu

SEQ ID NO: 165886 - RNA, 14 nt, Artificial Sequence
  Description of Artificial Sequence: Synthetic oligonucleotide
ugagaaaauuucaa

SEQ ID NO: 165887 - RNA, 11 nt, Artificial Sequence
  Description of Artificial Sequence: Synthetic oligonucleotide
aauccuccuga

SEQ ID NO: 165888 - RNA, 12 nt, Artificial Sequence
  Description of Artificial Sequence: Synthetic oligonucleotide
gugacaucauau

SEQ ID NO: 165889 - RNA, 13 nt, Artificial Sequence
  Description of Artificial Sequence: Synthetic oligonucleotide
aaucuucaucaua

SEQ ID NO: 165890 - RNA, 13 nt, Artificial Sequence
  Description of Artificial Sequence: Synthetic oligonucleotide
gacuagcuauuaa

SEQ ID NO: 165891 - RNA, 14 nt, Artificial Sequence
  Description of Artificial Sequence: Synthetic oligonucleotide
ucucuacuaaaaau

SEQ ID NO: 165892 - RNA, 12 nt, Artificial Sequence
  Description of Artificial Sequence: Synthetic oligonucleotide
ucuaucucgccu

SEQ ID NO: 165893 - RNA, 13 nt, Artificial Sequence
  Description of Artificial Sequence: Synthetic oligonucleotide
cuucgguccaguu

SEQ ID NO: 165894 - RNA, 11 nt, Artificial Sequence
  Description of Artificial Sequence: Synthetic oligonucleotide
gauguagccgc

SEQ ID NO: 165895 - RNA, 12 nt, Artificial Sequence
  Description of Artificial Sequence: Synthetic oligonucleotide
ugaggagacuug

SEQ ID NO: 165896 - RNA, 12 nt, Artificial Sequence
  Description of Artificial Sequence: Synthetic oligonucleotide
gaguagugagga

SEQ ID NO: 165897 - RNA, 14 nt, Artificial Sequence
  Description of Artificial Sequence: Synthetic oligonucleotide
cagaugaguacaaa

SEQ ID NO: 165898 - RNA, 13 nt, Artificial Sequence
  Description of Artificial Sequence: Synthetic oligonucleotide
guuguuaaugggc

SEQ ID NO: 165899 - RNA, 13 nt, Artificial Sequence
  Description of Artificial Sequence: Synthetic oligonucleotide
uuuuuaauuuauu

SEQ ID NO: 165900 - RNA, 12 nt, Artificial Sequence
  Description of Artificial Sequence: Synthetic oligonucleotide
uauuuaaauaug

SEQ ID NO: 165901 - RNA, 13 nt, Artificial Sequence
  Description of Artificial Sequence: Synthetic oligonucleotide
uauccuuuguuuc

SEQ ID NO: 165902 - RNA, 14 nt, Artificial Sequence
  Description of Artificial Sequence: Synthetic oligonucleotide
cgucuaaguguuug

SEQ ID NO: 165903 - RNA, 12 nt, Artificial Sequence
  Description of Artificial Sequence: Synthetic oligonucleotide
accugugacaaa

SEQ ID NO: 165904 - RNA, 13 nt, Artificial Sequence
  Description of Artificial Sequence: Synthetic oligonucleotide
ccaggcugaauua

SEQ ID NO: 165905 - RNA, 14 nt, Artificial Sequence
  Description of Artificial Sequence: Synthetic oligonucleotide
gucauucuuacaau

SEQ ID NO: 165906 - RNA, 15 nt, Artificial Sequence
  Description of Artificial Sequence: Synthetic oligonucleotide
ucauucuuacaauug

SEQ ID NO: 165907 - RNA, 12 nt, Artificial Sequence
  Description of Artificial Sequence: Synthetic oligonucleotide
cagagaguguac

SEQ ID NO: 165908 - RNA, 12 nt, Artificial Sequence
  Description of Artificial Sequence: Synthetic oligonucleotide
agaacucagcag

SEQ ID NO: 165909 - RNA, 13 nt, Artificial Sequence
  Description of Artificial Sequence: Synthetic oligonucleotide
uuuauuuucagua

SEQ ID NO: 165910 - RNA, 12 nt, Artificial Sequence
  Description of Artificial Sequence: Synthetic oligonucleotide
ucuuaaauggaa

SEQ ID NO: 165911 - RNA, 13 nt, Artificial Sequence
  Description of Artificial Sequence: Synthetic oligonucleotide
ugccuaaaauugu

SEQ ID NO: 165912 - RNA, 12 nt, Artificial Sequence
  Description of Artificial Sequence: Synthetic oligonucleotide
agacugugagcu

SEQ ID NO: 165913 - RNA, 14 nt, Artificial Sequence
  Description of Artificial Sequence: Synthetic oligonucleotide
ugcuuuuuauuaau

SEQ ID NO: 165914 - RNA, 13 nt, Artificial Sequence
  Description of Artificial Sequence: Synthetic oligonucleotide
cucuucuuacauu

SEQ ID NO: 165915 - RNA, 15 nt, Artificial Sequence
  Description of Artificial Sequence: Synthetic oligonucleotide
cauuuguaaaaaugu

SEQ ID NO: 165916 - RNA, 15 nt, Artificial Sequence
  Description of Artificial Sequence: Synthetic oligonucleotide
aucuuaauucauauu

SEQ ID NO: 165917 - RNA, 13 nt, Artificial Sequence
  Description of Artificial Sequence: Synthetic oligonucleotide
gaacuaaucauga

SEQ ID NO: 165918 - RNA, 12 nt, Artificial Sequence
  Description of Artificial Sequence: Synthetic oligonucleotide
ucugcucuuggg

SEQ ID NO: 165919 - RNA, 13 nt, Artificial Sequence
  Description of Artificial Sequence: Synthetic oligonucleotide
caguagcuuugag

SEQ ID NO: 165920 - RNA, 14 nt, Artificial Sequence
  Description of Artificial Sequence: Synthetic oligonucleotide
cacguaauauuuca

SEQ ID NO: 165921 - RNA, 13 nt, Artificial Sequence
  Description of Artificial Sequence: Synthetic oligonucleotide
uauucucuucacu

SEQ ID NO: 165922 - RNA, 14 nt, Artificial Sequence
  Description of Artificial Sequence: Synthetic oligonucleotide
cuaaugcuaagaaa

SEQ ID NO: 165923 - RNA, 12 nt, Artificial Sequence
  Description of Artificial Sequence: Synthetic oligonucleotide
gcugaaaaucaa

SEQ ID NO: 165924 - RNA, 14 nt, Artificial Sequence
  Description of Artificial Sequence: Synthetic oligonucleotide
aauaugauuacuuu

SEQ ID NO: 165925 - RNA, 14 nt, Artificial Sequence
  Description of Artificial Sequence: Synthetic oligonucleotide
cauuuuguucuaca

SEQ ID NO: 165926 - RNA, 12 nt, Artificial Sequence
  Description of Artificial Sequence: Synthetic oligonucleotide
cccgggacucuc

SEQ ID NO: 165927 - RNA, 14 nt, Artificial Sequence
  Description of Artificial Sequence: Synthetic oligonucleotide
ccuuuaaaguaaag

SEQ ID NO: 165928 - RNA, 13 nt, Artificial Sequence
  Description of Artificial Sequence: Synthetic oligonucleotide
ucuggaagccugg

SEQ ID NO: 165929 - RNA, 14 nt, Artificial Sequence
  Description of Artificial Sequence: Synthetic oligonucleotide
aaaacaaaagagag

SEQ ID NO: 165930 - RNA, 13 nt, Artificial Sequence
  Description of Artificial Sequence: Synthetic oligonucleotide
aucaguuaugccg

SEQ ID NO: 165931 - RNA, 13 nt, Artificial Sequence
  Description of Artificial Sequence: Synthetic oligonucleotide
uaaaagaagucca

SEQ ID NO: 165932 - RNA, 11 nt, Artificial Sequence
  Description of Artificial Sequence: Synthetic oligonucleotide
aggugagguua

SEQ ID NO: 165933 - RNA, 11 nt, Artificial Sequence
  Description of Artificial Sequence: Synthetic oligonucleotide
gggaagaggac

SEQ ID NO: 165934 - RNA, 13 nt, Artificial Sequence
  Description of Artificial Sequence: Synthetic oligonucleotide
aagcaaguauugu

SEQ ID NO: 165935 - RNA, 12 nt, Artificial Sequence
  Description of Artificial Sequence: Synthetic oligonucleotide
auuguagcacuc

SEQ ID NO: 165936 - RNA, 14 nt, Artificial Sequence
  Description of Artificial Sequence: Synthetic oligonucleotide
acaaaaccacaaau

SEQ ID NO: 165937 - RNA, 12 nt, Artificial Sequence
  Description of Artificial Sequence: Synthetic oligonucleotide
uaagcccauaca

SEQ ID NO: 165938 - RNA, 11 nt, Artificial Sequence
  Description of Artificial Sequence: Synthetic oligonucleotide
agcccauacag

SEQ ID NO: 165939 - RNA, 12 nt, Artificial Sequence
  Description of Artificial Sequence: Synthetic oligonucleotide
cagaaaccuucc

SEQ ID NO: 165940 - RNA, 10 nt, Artificial Sequence
  Description of Artificial Sequence: Synthetic oligonucleotide
guauaccuac

SEQ ID NO: 165941 - RNA, 13 nt, Artificial Sequence
  Description of Artificial Sequence: Synthetic oligonucleotide
gccaguuuucgga

SEQ ID NO: 165942 - RNA, 9 nt, Artificial Sequence
  Description of Artificial Sequence: Synthetic oligonucleotide
ggaacaggg

SEQ ID NO: 165943 - RNA, 13 nt, Artificial Sequence
  Description of Artificial Sequence: Synthetic oligonucleotide
uuaacuuuccagu

SEQ ID NO: 165944 - RNA, 14 nt, Artificial Sequence
  Description of Artificial Sequence: Synthetic oligonucleotide
aaaguuugguuuug

SEQ ID NO: 165945 - RNA, 12 nt, Artificial Sequence
  Description of Artificial Sequence: Synthetic oligonucleotide
cuucccacugua

SEQ ID NO: 165946 - RNA, 13 nt, Artificial Sequence
  Description of Artificial Sequence: Synthetic oligonucleotide
ugauaccauauga

SEQ ID NO: 165947 - RNA, 11 nt, Artificial Sequence
  Description of Artificial Sequence: Synthetic oligonucleotide
aacaugggcug

SEQ ID NO: 165948 - RNA, 13 nt, Artificial Sequence
  Description of Artificial Sequence: Synthetic oligonucleotide
caacuuuuucaua

SEQ ID NO: 165949 - RNA, 12 nt, Artificial Sequence
  Description of Artificial Sequence: Synthetic oligonucleotide
caugaggccgga

SEQ ID NO: 165950 - RNA, 11 nt, Artificial Sequence
  Description of Artificial Sequence: Synthetic oligonucleotide
acugcauuugu

SEQ ID NO: 165951 - RNA, 13 nt, Artificial Sequence
  Description of Artificial Sequence: Synthetic oligonucleotide
aauguuuacuacc

SEQ ID NO: 165952 - RNA, 15 nt, Artificial Sequence
  Description of Artificial Sequence: Synthetic oligonucleotide
aauuuuuugaugaaa

SEQ ID NO: 165953 - RNA, 14 nt, Artificial Sequence
  Description of Artificial Sequence: Synthetic oligonucleotide
cagugugugaauuu

SEQ ID NO: 165954 - RNA, 13 nt, Artificial Sequence
  Description of Artificial Sequence: Synthetic oligonucleotide
gagcaauguaugu

SEQ ID NO: 165955 - RNA, 14 nt, Artificial Sequence
  Description of Artificial Sequence: Synthetic oligonucleotide
aaagcacauauaua

SEQ ID NO: 165956 - RNA, 14 nt, Artificial Sequence
  Description of Artificial Sequence: Synthetic oligonucleotide
guaauaguuucucc

SEQ ID NO: 165957 - RNA, 13 nt, Artificial Sequence
  Description of Artificial Sequence: Synthetic oligonucleotide
aguuucuccaaau

SEQ ID NO: 165958 - RNA, 13 nt, Artificial Sequence
  Description of Artificial Sequence: Synthetic oligonucleotide
uacuuccuagaaa

SEQ ID NO: 165959 - RNA, 13 nt, Artificial Sequence
  Description of Artificial Sequence: Synthetic oligonucleotide
uacaccauauaug

SEQ ID NO: 165960 - RNA, 14 nt, Artificial Sequence
  Description of Artificial Sequence: Synthetic oligonucleotide
auauaugaauggag

SEQ ID NO: 165961 - RNA, 13 nt, Artificial Sequence
  Description of Artificial Sequence: Synthetic oligonucleotide
acgagaagaagau

SEQ ID NO: 165962 - RNA, 13 nt, Artificial Sequence
  Description of Artificial Sequence: Synthetic oligonucleotide
ucauuuacaggga

SEQ ID NO: 165963 - RNA, 13 nt, Artificial Sequence
  Description of Artificial Sequence: Synthetic oligonucleotide
cauuuacagggac

SEQ ID NO: 165964 - RNA, 10 nt, Artificial Sequence
  Description of Artificial Sequence: Synthetic oligonucleotide
agggaccuga

SEQ ID NO: 165965 - RNA, 14 nt, Artificial Sequence
  Description of Artificial Sequence: Synthetic oligonucleotide
uguuugacugcauc

SEQ ID NO: 165966 - RNA, 13 nt, Artificial Sequence
  Description of Artificial Sequence: Synthetic oligonucleotide
uuugacugcaucg

SEQ ID NO: 165967 - RNA, 12 nt, Artificial Sequence
  Description of Artificial Sequence: Synthetic oligonucleotide
gaguucacaggg

SEQ ID NO: 165968 - RNA, 13 nt, Artificial Sequence
  Description of Artificial Sequence: Synthetic oligonucleotide
ggcaccucugucc

SEQ ID NO: 165969 - RNA, 15 nt, Artificial Sequence
  Description of Artificial Sequence: Synthetic oligonucleotide
gguuugucuuuuuaa

SEQ ID NO: 165970 - RNA, 14 nt, Artificial Sequence
  Description of Artificial Sequence: Synthetic oligonucleotide
uuugucuuuuuaag

SEQ ID NO: 165971 - RNA, 13 nt, Artificial Sequence
  Description of Artificial Sequence: Synthetic oligonucleotide
ccuaaagguuguc

SEQ ID NO: 165972 - RNA, 12 nt, Artificial Sequence
  Description of Artificial Sequence: Synthetic oligonucleotide
aagguugucgac

SEQ ID NO: 165973 - RNA, 13 nt, Artificial Sequence
  Description of Artificial Sequence: Synthetic oligonucleotide
accuggcaauugu

SEQ ID NO: 165974 - RNA, 12 nt, Artificial Sequence
  Description of Artificial Sequence: Synthetic oligonucleotide
aguggugcgagg

SEQ ID NO: 165975 - RNA, 13 nt, Artificial Sequence
  Description of Artificial Sequence: Synthetic oligonucleotide
agagacaugaaau

SEQ ID NO: 165976 - RNA, 13 nt, Artificial Sequence
  Description of Artificial Sequence: Synthetic oligonucleotide
auauauuucucca

SEQ ID NO: 165977 - RNA, 10 nt, Artificial Sequence
  Description of Artificial Sequence: Synthetic oligonucleotide
caugaaggcu

SEQ ID NO: 165978 - RNA, 11 nt, Artificial Sequence
  Description of Artificial Sequence: Synthetic oligonucleotide
gcuggaguggu

SEQ ID NO: 165979 - RNA, 11 nt, Artificial Sequence
  Description of Artificial Sequence: Synthetic oligonucleotide
aggaagagagg

SEQ ID NO: 165980 - RNA, 12 nt, Artificial Sequence
  Description of Artificial Sequence: Synthetic oligonucleotide
cuugcaucgggc

SEQ ID NO: 165981 - RNA, 13 nt, Artificial Sequence
  Description of Artificial Sequence: Synthetic oligonucleotide
auauccuacugug

SEQ ID NO: 165982 - RNA, 13 nt, Artificial Sequence
  Description of Artificial Sequence: Synthetic oligonucleotide
uccuacuguguaa

SEQ ID NO: 165983 - RNA, 12 nt, Artificial Sequence
  Description of Artificial Sequence: Synthetic oligonucleotide
ccuuguagugua

SEQ ID NO: 165984 - RNA, 13 nt, Artificial Sequence
  Description of Artificial Sequence: Synthetic oligonucleotide
ucuuuguugauug

SEQ ID NO: 165985 - RNA, 14 nt, Artificial Sequence
  Description of Artificial Sequence: Synthetic oligonucleotide
uuuguugauugaaa

SEQ ID NO: 165986 - RNA, 15 nt, Artificial Sequence
  Description of Artificial Sequence: Synthetic oligonucleotide
uucuuuuucuuccau

SEQ ID NO: 165987 - RNA, 13 nt, Artificial Sequence
  Description of Artificial Sequence: Synthetic oligonucleotide
aaucuuccuucua

SEQ ID NO: 165988 - RNA, 13 nt, Artificial Sequence
  Description of Artificial Sequence: Synthetic oligonucleotide
uugaaugcuucau

SEQ ID NO: 165989 - RNA, 13 nt, Artificial Sequence
  Description of Artificial Sequence: Synthetic oligonucleotide
ugaaugcuucaug

SEQ ID NO: 165990 - RNA, 13 nt, Artificial Sequence
  Description of Artificial Sequence: Synthetic oligonucleotide
aauucuacuuuga

SEQ ID NO: 165991 - RNA, 13 nt, Artificial Sequence
  Description of Artificial Sequence: Synthetic oligonucleotide
agcaacuacagac

SEQ ID NO: 165992 - RNA, 13 nt, Artificial Sequence
  Description of Artificial Sequence: Synthetic oligonucleotide
gaccaaggucaac

SEQ ID NO: 165993 - RNA, 13 nt, Artificial Sequence
  Description of Artificial Sequence: Synthetic oligonucleotide
cgacuaucucgac

SEQ ID NO: 165994 - RNA, 13 nt, Artificial Sequence
  Description of Artificial Sequence: Synthetic oligonucleotide
aaccuucccaaac

SEQ ID NO: 165995 - RNA, 14 nt, Artificial Sequence
  Description of Artificial Sequence: Synthetic oligonucleotide
ccaagcuuagaacu

SEQ ID NO: 165996 - RNA, 15 nt, Artificial Sequence
  Description of Artificial Sequence: Synthetic oligonucleotide
agcuuagaacuuuaa

SEQ ID NO: 165997 - RNA, 11 nt, Artificial Sequence
  Description of Artificial Sequence: Synthetic oligonucleotide
aagaccaccac

SEQ ID NO: 165998 - RNA, 14 nt, Artificial Sequence
  Description of Artificial Sequence: Synthetic oligonucleotide
gcgagaaauaaagu

SEQ ID NO: 165999 - RNA, 14 nt, Artificial Sequence
  Description of Artificial Sequence: Synthetic oligonucleotide
cgagaaauaaaguu

SEQ ID NO: 166000 - RNA, 12 nt, Artificial Sequence
  Description of Artificial Sequence: Synthetic oligonucleotide
aggaaaugaucc

SEQ ID NO: 166001 - RNA, 13 nt, Artificial Sequence
  Description of Artificial Sequence: Synthetic oligonucleotide
gaagaaaugaaac

SEQ ID NO: 166002 - RNA, 13 nt, Artificial Sequence
  Description of Artificial Sequence: Synthetic oligonucleotide
guuuccauccucc

SEQ ID NO: 166003 - RNA, 15 nt, Artificial Sequence
  Description of Artificial Sequence: Synthetic oligonucleotide
acugaaaaucuuuga

SEQ ID NO: 166004 - RNA, 11 nt, Artificial Sequence
  Description of Artificial Sequence: Synthetic oligonucleotide
ugccguucagg

SEQ ID NO: 166005 - RNA, 13 nt, Artificial Sequence
  Description of Artificial Sequence: Synthetic oligonucleotide
caggguccagaag

SEQ ID NO: 166006 - RNA, 13 nt, Artificial Sequence
  Description of Artificial Sequence: Synthetic oligonucleotide
ucaagacugcuug

SEQ ID NO: 166007 - RNA, 13 nt, Artificial Sequence
  Description of Artificial Sequence: Synthetic oligonucleotide
uccaugucuuugg

SEQ ID NO: 166008 - RNA, 11 nt, Artificial Sequence
  Description of Artificial Sequence: Synthetic oligonucleotide
gccugaaacac

SEQ ID NO: 166009 - RNA, 12 nt, Artificial Sequence
  Description of Artificial Sequence: Synthetic oligonucleotide
ucucuguaccuc

SEQ ID NO: 166010 - RNA, 12 nt, Artificial Sequence
  Description of Artificial Sequence: Synthetic oligonucleotide
agcaagacaaga

SEQ ID NO: 166011 - RNA, 13 nt, Artificial Sequence
  Description of Artificial Sequence: Synthetic oligonucleotide
gcaagacaagaaa

SEQ ID NO: 166012 - RNA, 12 nt, Artificial Sequence
  Description of Artificial Sequence: Synthetic oligonucleotide
uguacaagaucc

SEQ ID NO: 166013 - RNA, 12 nt, Artificial Sequence
  Description of Artificial Sequence: Synthetic oligonucleotide
cguacuugcaga

SEQ ID NO: 166014 - RNA, 13 nt, Artificial Sequence
  Description of Artificial Sequence: Synthetic oligonucleotide
cgaucgauacaga

SEQ ID NO: 166015 - RNA, 13 nt, Artificial Sequence
  Description of Artificial Sequence: Synthetic oligonucleotide
uauaaaaauaaau

SEQ ID NO: 166016 - RNA, 13 nt, Artificial Sequence
  Description of Artificial Sequence: Synthetic oligonucleotide
uaaaaauaaauau

SEQ ID NO: 166017 - RNA, 13 nt, Artificial Sequence
  Description of Artificial Sequence: Synthetic oligonucleotide
uuugacugcugug

SEQ ID NO: 166018 - RNA, 13 nt, Artificial Sequence
  Description of Artificial Sequence: Synthetic oligonucleotide
ggagaugagagac

SEQ ID NO: 166019 - RNA, 10 nt, Artificial Sequence
  Description of Artificial Sequence: Synthetic oligonucleotide
ucccacuugg

SEQ ID NO: 166020 - RNA, 10 nt, Artificial Sequence
  Description of Artificial Sequence: Synthetic oligonucleotide
guucacggcc

SEQ ID NO: 166021 - RNA, 12 nt, Artificial Sequence
  Description of Artificial Sequence: Synthetic oligonucleotide
accaucacacca

SEQ ID NO: 166022 - RNA, 10 nt, Artificial Sequence
  Description of Artificial Sequence: Synthetic oligonucleotide
cugcggguuu

SEQ ID NO: 166023 - RNA, 9 nt, Artificial Sequence
  Description of Artificial Sequence: Synthetic oligonucleotide
uccaguuug

SEQ ID NO: 166024 - RNA, 12 nt, Artificial Sequence
  Description of Artificial Sequence: Synthetic oligonucleotide
uuaaggacuucu

SEQ ID NO: 166025 - RNA, 12 nt, Artificial Sequence
  Description of Artificial Sequence: Synthetic oligonucleotide
agugggacagag

SEQ ID NO: 166026 - RNA, 13 nt, Artificial Sequence
  Description of Artificial Sequence: Synthetic oligonucleotide
auuuguuauugug

SEQ ID NO: 166027 - RNA, 12 nt, Artificial Sequence
  Description of Artificial Sequence: Synthetic oligonucleotide
ucaaaugcauuu

SEQ ID NO: 166028 - RNA, 9 nt, Artificial Sequence
  Description of Artificial Sequence: Synthetic oligonucleotide
aggaaagcc

SEQ ID NO: 166029 - RNA, 10 nt, Artificial Sequence
  Description of Artificial Sequence: Synthetic oligonucleotide
ggaaagcccu

SEQ ID NO: 166030 - RNA, 11 nt, Artificial Sequence
  Description of Artificial Sequence: Synthetic oligonucleotide
ccagcauggcc

SEQ ID NO: 166031 - RNA, 10 nt, Artificial Sequence
  Description of Artificial Sequence: Synthetic oligonucleotide
uucucccuga

SEQ ID NO: 166032 - RNA, 11 nt, Artificial Sequence
  Description of Artificial Sequence: Synthetic oligonucleotide
aagaagcccuu

SEQ ID NO: 166033 - RNA, 11 nt, Artificial Sequence
  Description of Artificial Sequence: Synthetic oligonucleotide
gaagcccuuca

SEQ ID NO: 166034 - RNA, 10 nt, Artificial Sequence
  Description of Artificial Sequence: Synthetic oligonucleotide
cccuucagcg

SEQ ID NO: 166035 - RNA, 10 nt, Artificial Sequence
  Description of Artificial Sequence: Synthetic oligonucleotide
cuucagcggc

SEQ ID NO: 166036 - RNA, 11 nt, Artificial Sequence
  Description of Artificial Sequence: Synthetic oligonucleotide
cagcggccagu

SEQ ID NO: 166037 - RNA, 11 nt, Artificial Sequence
  Description of Artificial Sequence: Synthetic oligonucleotide
gaaaagcuccg

SEQ ID NO: 166038 - RNA, 10 nt, Artificial Sequence
  Description of Artificial Sequence: Synthetic oligonucleotide
aaagcuccgg

SEQ ID NO: 166039 - RNA, 12 nt, Artificial Sequence
  Description of Artificial Sequence: Synthetic oligonucleotide
gucaacagucug

SEQ ID NO: 166040 - RNA, 12 nt, Artificial Sequence
  Description of Artificial Sequence: Synthetic oligonucleotide
agaguucaaaag

SEQ ID NO: 166041 - RNA, 12 nt, Artificial Sequence
  Description of Artificial Sequence: Synthetic oligonucleotide
gaguucaaaagc

SEQ ID NO: 166042 - RNA, 11 nt, Artificial Sequence
  Description of Artificial Sequence: Synthetic oligonucleotide
ucaaaagcccu

SEQ ID NO: 166043 - RNA, 11 nt, Artificial Sequence
  Description of Artificial Sequence: Synthetic oligonucleotide
caaaagcccuu

SEQ ID NO: 166044 - RNA, 11 nt, Artificial Sequence
  Description of Artificial Sequence: Synthetic oligonucleotide
aaagcccuuca

SEQ ID NO: 166045 - RNA, 11 nt, Artificial Sequence
  Description of Artificial Sequence: Synthetic oligonucleotide
aagcccuucag

SEQ ID NO: 166046 - RNA, 12 nt, Artificial Sequence
  Description of Artificial Sequence: Synthetic oligonucleotide
ugaagccgcucg

SEQ ID NO: 166047 - RNA, 11 nt, Artificial Sequence
  Description of Artificial Sequence: Synthetic oligonucleotide
acgccagucaa

SEQ ID NO: 166048 - RNA, 12 nt, Artificial Sequence
  Description of Artificial Sequence: Synthetic oligonucleotide
ucuuggugcgug

SEQ ID NO: 166049 - RNA, 13 nt, Artificial Sequence
  Description of Artificial Sequence: Synthetic oligonucleotide
uuggauucaucag

SEQ ID NO: 166050 - RNA, 12 nt, Artificial Sequence
  Description of Artificial Sequence: Synthetic oligonucleotide
ggaauaccuaag

SEQ ID NO: 166051 - RNA, 11 nt, Artificial Sequence
  Description of Artificial Sequence: Synthetic oligonucleotide
uuugaggcuca

SEQ ID NO: 166052 - RNA, 10 nt, Artificial Sequence
  Description of Artificial Sequence: Synthetic oligonucleotide
cuacaauugg

SEQ ID NO: 166053 - RNA, 11 nt, Artificial Sequence
  Description of Artificial Sequence: Synthetic oligonucleotide
aguuaggagcc

SEQ ID NO: 166054 - RNA, 12 nt, Artificial Sequence
  Description of Artificial Sequence: Synthetic oligonucleotide
gucaauauccac

SEQ ID NO: 166055 - RNA, 12 nt, Artificial Sequence
  Description of Artificial Sequence: Synthetic oligonucleotide
uguucagucaca

SEQ ID NO: 166056 - RNA, 11 nt, Artificial Sequence
  Description of Artificial Sequence: Synthetic oligonucleotide
cacacacauac

SEQ ID NO: 166057 - RNA, 11 nt, Artificial Sequence
  Description of Artificial Sequence: Synthetic oligonucleotide
uccuuuugcuu

SEQ ID NO: 166058 - RNA, 15 nt, Artificial Sequence
  Description of Artificial Sequence: Synthetic oligonucleotide
uuuaaaguaauuuuu

SEQ ID NO: 166059 - RNA, 12 nt, Artificial Sequence
  Description of Artificial Sequence: Synthetic oligonucleotide
aacagucaaugg

SEQ ID NO: 166060 - RNA, 12 nt, Artificial Sequence
  Description of Artificial Sequence: Synthetic oligonucleotide
cgacaaaccaau

SEQ ID NO: 166061 - RNA, 11 nt, Artificial Sequence
  Description of Artificial Sequence: Synthetic oligonucleotide
cugcuaccacu

SEQ ID NO: 166062 - RNA, 12 nt, Artificial Sequence
  Description of Artificial Sequence: Synthetic oligonucleotide
caagcggucuua

SEQ ID NO: 166063 - RNA, 12 nt, Artificial Sequence
  Description of Artificial Sequence: Synthetic oligonucleotide
gucuuaccggcu

SEQ ID NO: 166064 - RNA, 10 nt, Artificial Sequence
  Description of Artificial Sequence: Synthetic oligonucleotide
auggguuacc

SEQ ID NO: 166065 - RNA, 10 nt, Artificial Sequence
  Description of Artificial Sequence: Synthetic oligonucleotide
uuaccugcga

SEQ ID NO: 166066 - RNA, 11 nt, Artificial Sequence
  Description of Artificial Sequence: Synthetic oligonucleotide
aucuugcugag

SEQ ID NO: 166067 - RNA, 12 nt, Artificial Sequence
  Description of Artificial Sequence: Synthetic oligonucleotide
gcauaaaacagu

SEQ ID NO: 166068 - RNA, 11 nt, Artificial Sequence
  Description of Artificial Sequence: Synthetic oligonucleotide
uccuuuauccu

SEQ ID NO: 166069 - RNA, 11 nt, Artificial Sequence
  Description of Artificial Sequence: Synthetic oligonucleotide
aacgcaaguug

SEQ ID NO: 166070 - RNA, 12 nt, Artificial Sequence
  Description of Artificial Sequence: Synthetic oligonucleotide
aacugaaaccau

SEQ ID NO: 166071 - RNA, 13 nt, Artificial Sequence
  Description of Artificial Sequence: Synthetic oligonucleotide
cuuuguuaaauau

SEQ ID NO: 166072 - RNA, 13 nt, Artificial Sequence
  Description of Artificial Sequence: Synthetic oligonucleotide
uauauuaaaaguu

SEQ ID NO: 166073 - RNA, 12 nt, Artificial Sequence
  Description of Artificial Sequence: Synthetic oligonucleotide
uuuugacuuaac

SEQ ID NO: 166074 - RNA, 12 nt, Artificial Sequence
  Description of Artificial Sequence: Synthetic oligonucleotide
caaacucagcac

SEQ ID NO: 166075 - RNA, 10 nt, Artificial Sequence
  Description of Artificial Sequence: Synthetic oligonucleotide
gcugaccuca

SEQ ID NO: 166076 - RNA, 13 nt, Artificial Sequence
  Description of Artificial Sequence: Synthetic oligonucleotide
uuauucagaucgc

SEQ ID NO: 166077 - RNA, 12 nt, Artificial Sequence
  Description of Artificial Sequence: Synthetic oligonucleotide
ggguucugggau

SEQ ID NO: 166078 - RNA, 14 nt, Artificial Sequence
  Description of Artificial Sequence: Synthetic oligonucleotide
uauuggaaauuaug

SEQ ID NO: 166079 - RNA, 12 nt, Artificial Sequence
  Description of Artificial Sequence: Synthetic oligonucleotide
uggaagcacuag

SEQ ID NO: 166080 - RNA, 12 nt, Artificial Sequence
  Description of Artificial Sequence: Synthetic oligonucleotide
uuuuuaugugga

SEQ ID NO: 166081 - RNA, 11 nt, Artificial Sequence
  Description of Artificial Sequence: Synthetic oligonucleotide
gaauugguaga

SEQ ID NO: 166082 - RNA, 12 nt, Artificial Sequence
  Description of Artificial Sequence: Synthetic oligonucleotide
uagacuuggaga

SEQ ID NO: 166083 - RNA, 12 nt, Artificial Sequence
  Description of Artificial Sequence: Synthetic oligonucleotide
uacaguauucca

SEQ ID NO: 166084 - RNA, 14 nt, Artificial Sequence
  Description of Artificial Sequence: Synthetic oligonucleotide
cacugaugaauuaa

SEQ ID NO: 166085 - RNA, 11 nt, Artificial Sequence
  Description of Artificial Sequence: Synthetic oligonucleotide
cacaucaucac

SEQ ID NO: 166086 - RNA, 12 nt, Artificial Sequence
  Description of Artificial Sequence: Synthetic oligonucleotide
ucaccaaacaga

SEQ ID NO: 166087 - RNA, 11 nt, Artificial Sequence
  Description of Artificial Sequence: Synthetic oligonucleotide
gaacaugaugg

SEQ ID NO: 166088 - RNA, 11 nt, Artificial Sequence
  Description of Artificial Sequence: Synthetic oligonucleotide
auguagacugc

SEQ ID NO: 166089 - RNA, 12 nt, Artificial Sequence
  Description of Artificial Sequence: Synthetic oligonucleotide
gaucuauuuaug

SEQ ID NO: 166090 - RNA, 11 nt, Artificial Sequence
  Description of Artificial Sequence: Synthetic oligonucleotide
cacuauuauca

SEQ ID NO: 166091 - RNA, 10 nt, Artificial Sequence
  Description of Artificial Sequence: Synthetic oligonucleotide
ucaguucugc

SEQ ID NO: 166092 - RNA, 12 nt, Artificial Sequence
  Description of Artificial Sequence: Synthetic oligonucleotide
gauuaaaccuac

SEQ ID NO: 166093 - RNA, 12 nt, Artificial Sequence
  Description of Artificial Sequence: Synthetic oligonucleotide
uaaaauccuucu

SEQ ID NO: 166094 - RNA, 11 nt, Artificial Sequence
  Description of Artificial Sequence: Synthetic oligonucleotide
augcuguagac

SEQ ID NO: 166095 - RNA, 12 nt, Artificial Sequence
  Description of Artificial Sequence: Synthetic oligonucleotide
ugauaggaauag

SEQ ID NO: 166096 - RNA, 10 nt, Artificial Sequence
  Description of Artificial Sequence: Synthetic oligonucleotide
auggcccuga

SEQ ID NO: 166097 - RNA, 10 nt, Artificial Sequence
  Description of Artificial Sequence: Synthetic oligonucleotide
uccucaagca

SEQ ID NO: 166098 - RNA, 9 nt, Artificial Sequence
  Description of Artificial Sequence: Synthetic oligonucleotide
uucagccca

SEQ ID NO: 166099 - RNA, 10 nt, Artificial Sequence
  Description of Artificial Sequence: Synthetic oligonucleotide
cugcugaacc

SEQ ID NO: 166100 - RNA, 11 nt, Artificial Sequence
  Description of Artificial Sequence: Synthetic oligonucleotide
aguucucuuca

SEQ ID NO: 166101 - RNA, 10 nt, Artificial Sequence
  Description of Artificial Sequence: Synthetic oligonucleotide
cagccuagag

SEQ ID NO: 166102 - RNA, 12 nt, Artificial Sequence
  Description of Artificial Sequence: Synthetic oligonucleotide
ucugugaagugu

SEQ ID NO: 166103 - RNA, 13 nt, Artificial Sequence
  Description of Artificial Sequence: Synthetic oligonucleotide
gagaaaauuucaa

SEQ ID NO: 166104 - RNA, 10 nt, Artificial Sequence
  Description of Artificial Sequence: Synthetic oligonucleotide
auccuccuga

SEQ ID NO: 166105 - RNA, 11 nt, Artificial Sequence
  Description of Artificial Sequence: Synthetic oligonucleotide
ugacaucauau

SEQ ID NO: 166106 - RNA, 12 nt, Artificial Sequence
  Description of Artificial Sequence: Synthetic oligonucleotide
aucuucaucaua

SEQ ID NO: 166107 - RNA, 12 nt, Artificial Sequence
  Description of Artificial Sequence: Synthetic oligonucleotide
acuagcuauuaa

SEQ ID NO: 166108 - RNA, 13 nt, Artificial Sequence
  Description of Artificial Sequence: Synthetic oligonucleotide
cucuacuaaaaau

SEQ ID NO: 166109 - RNA, 11 nt, Artificial Sequence
  Description of Artificial Sequence: Synthetic oligonucleotide
cuaucucgccu

SEQ ID NO: 166110 - RNA, 12 nt, Artificial Sequence
  Description of Artificial Sequence: Synthetic oligonucleotide
uucgguccaguu

SEQ ID NO: 166111 - RNA, 10 nt, Artificial Sequence
  Description of Artificial Sequence: Synthetic oligonucleotide
auguagccgc

SEQ ID NO: 166112 - RNA, 11 nt, Artificial Sequence
  Description of Artificial Sequence: Synthetic oligonucleotide
gaggagacuug

SEQ ID NO: 166113 - RNA, 11 nt, Artificial Sequence
  Description of Artificial Sequence: Synthetic oligonucleotide
aguagugagga

SEQ ID NO: 166114 - RNA, 13 nt, Artificial Sequence
  Description of Artificial Sequence: Synthetic oligonucleotide
agaugaguacaaa

SEQ ID NO: 166115 - RNA, 12 nt, Artificial Sequence
  Description of Artificial Sequence: Synthetic oligonucleotide
uuguuaaugggc

SEQ ID NO: 166116 - RNA, 12 nt, Artificial Sequence
  Description of Artificial Sequence: Synthetic oligonucleotide
uuuuaauuuauu

SEQ ID NO: 166117 - RNA, 11 nt, Artificial Sequence
  Description of Artificial Sequence: Synthetic oligonucleotide
auuuaaauaug

SEQ ID NO: 166118 - RNA, 12 nt, Artificial Sequence
  Description of Artificial Sequence: Synthetic oligonucleotide
auccuuuguuuc

SEQ ID NO: 166119 - RNA, 13 nt, Artificial Sequence
  Description of Artificial Sequence: Synthetic oligonucleotide
gucuaaguguuug

SEQ ID NO: 166120 - RNA, 11 nt, Artificial Sequence
  Description of Artificial Sequence: Synthetic oligonucleotide
ccugugacaaa

SEQ ID NO: 166121 - RNA, 12 nt, Artificial Sequence
  Description of Artificial Sequence: Synthetic oligonucleotide
caggcugaauua

SEQ ID NO: 166122 - RNA, 13 nt, Artificial Sequence
  Description of Artificial Sequence: Synthetic oligonucleotide
ucauucuuacaau

SEQ ID NO: 166123 - RNA, 14 nt, Artificial Sequence
  Description of Artificial Sequence: Synthetic oligonucleotide
cauucuuacaauug

SEQ ID NO: 166124 - RNA, 11 nt, Artificial Sequence
  Description of Artificial Sequence: Synthetic oligonucleotide
agagaguguac

SEQ ID NO: 166125 - RNA, 11 nt, Artificial Sequence
  Description of Artificial Sequence: Synthetic oligonucleotide
gaacucagcag

SEQ ID NO: 166126 - RNA, 12 nt, Artificial Sequence
  Description of Artificial Sequence: Synthetic oligonucleotide
uuauuuucagua

SEQ ID NO: 166127 - RNA, 11 nt, Artificial Sequence
  Description of Artificial Sequence: Synthetic oligonucleotide
cuuaaauggaa

SEQ ID NO: 166128 - RNA, 12 nt, Artificial Sequence
  Description of Artificial Sequence: Synthetic oligonucleotide
gccuaaaauugu

SEQ ID NO: 166129 - RNA, 12 nt, Artificial Sequence
  Description of Artificial Sequence: Synthetic oligonucleotide
acuaacaucugg

SEQ ID NO: 166130 - RNA, 11 nt, Artificial Sequence
  Description of Artificial Sequence: Synthetic oligonucleotide
gacugugagcu

SEQ ID NO: 166131 - RNA, 13 nt, Artificial Sequence
  Description of Artificial Sequence: Synthetic oligonucleotide
gcuuuuuauuaau

SEQ ID NO: 166132 - RNA, 12 nt, Artificial Sequence
  Description of Artificial Sequence: Synthetic oligonucleotide
ucuucuuacauu

SEQ ID NO: 166133 - RNA, 14 nt, Artificial Sequence
  Description of Artificial Sequence: Synthetic oligonucleotide
auuuguaaaaaugu

SEQ ID NO: 166134 - RNA, 14 nt, Artificial Sequence
  Description of Artificial Sequence: Synthetic oligonucleotide
ucuuaauucauauu

SEQ ID NO: 166135 - RNA, 12 nt, Artificial Sequence
  Description of Artificial Sequence: Synthetic oligonucleotide
aacuaaucauga

SEQ ID NO: 166136 - RNA, 11 nt, Artificial Sequence
  Description of Artificial Sequence: Synthetic oligonucleotide
cugcucuuggg

SEQ ID NO: 166137 - RNA, 12 nt, Artificial Sequence
  Description of Artificial Sequence: Synthetic oligonucleotide
aguagcuuugag

SEQ ID NO: 166138 - RNA, 13 nt, Artificial Sequence
  Description of Artificial Sequence: Synthetic oligonucleotide
acguaauauuuca

SEQ ID NO: 166139 - RNA, 12 nt, Artificial Sequence
  Description of Artificial Sequence: Synthetic oligonucleotide
auucucuucacu

SEQ ID NO: 166140 - RNA, 13 nt, Artificial Sequence
  Description of Artificial Sequence: Synthetic oligonucleotide
uaaugcuaagaaa

SEQ ID NO: 166141 - RNA, 11 nt, Artificial Sequence
  Description of Artificial Sequence: Synthetic oligonucleotide
cugaaaaucaa

SEQ ID NO: 166142 - RNA, 13 nt, Artificial Sequence
  Description of Artificial Sequence: Synthetic oligonucleotide
auaugauuacuuu

SEQ ID NO: 166143 - RNA, 13 nt, Artificial Sequence
  Description of Artificial Sequence: Synthetic oligonucleotide
auuuuguucuaca

SEQ ID NO: 166144 - RNA, 11 nt, Artificial Sequence
  Description of Artificial Sequence: Synthetic oligonucleotide
ccgggacucuc

SEQ ID NO: 166145 - RNA, 13 nt, Artificial Sequence
  Description of Artificial Sequence: Synthetic oligonucleotide
cuuuaaaguaaag

SEQ ID NO: 166146 - RNA, 12 nt, Artificial Sequence
  Description of Artificial Sequence: Synthetic oligonucleotide
cuggaagccugg

SEQ ID NO: 166147 - RNA, 13 nt, Artificial Sequence
  Description of Artificial Sequence: Synthetic oligonucleotide
aaacaaaagagag

SEQ ID NO: 166148 - RNA, 12 nt, Artificial Sequence
  Description of Artificial Sequence: Synthetic oligonucleotide
ucaguuaugccg

SEQ ID NO: 166149 - RNA, 12 nt, Artificial Sequence
  Description of Artificial Sequence: Synthetic oligonucleotide
aaaagaagucca

SEQ ID NO: 166150 - RNA, 10 nt, Artificial Sequence
  Description of Artificial Sequence: Synthetic oligonucleotide
ggugagguua

SEQ ID NO: 166151 - RNA, 10 nt, Artificial Sequence
  Description of Artificial Sequence: Synthetic oligonucleotide
ggaagaggac

SEQ ID NO: 166152 - RNA, 12 nt, Artificial Sequence
  Description of Artificial Sequence: Synthetic oligonucleotide
agcaaguauugu

SEQ ID NO: 166153 - RNA, 11 nt, Artificial Sequence
  Description of Artificial Sequence: Synthetic oligonucleotide
uuguagcacuc

SEQ ID NO: 166154 - RNA, 13 nt, Artificial Sequence
  Description of Artificial Sequence: Synthetic oligonucleotide
caaaaccacaaau

SEQ ID NO: 166155 - RNA, 11 nt, Artificial Sequence
  Description of Artificial Sequence: Synthetic oligonucleotide
aagcccauaca

SEQ ID NO: 166156 - RNA, 10 nt, Artificial Sequence
  Description of Artificial Sequence: Synthetic oligonucleotide
gcccauacag

SEQ ID NO: 166157 - RNA, 11 nt, Artificial Sequence
  Description of Artificial Sequence: Synthetic oligonucleotide
agaaaccuucc

SEQ ID NO: 166158 - RNA, 9 nt, Artificial Sequence
  Description of Artificial Sequence: Synthetic oligonucleotide
uauaccuac

SEQ ID NO: 166159 - RNA, 12 nt, Artificial Sequence
  Description of Artificial Sequence: Synthetic oligonucleotide
ccaguuuucgga

SEQ ID NO: 166160 - RNA, 8 nt, Artificial Sequence
  Description of Artificial Sequence: Synthetic oligonucleotide
gaacaggg

SEQ ID NO: 166161 - RNA, 12 nt, Artificial Sequence
  Description of Artificial Sequence: Synthetic oligonucleotide
uaacuuuccagu

SEQ ID NO: 166162 - RNA, 13 nt, Artificial Sequence
  Description of Artificial Sequence: Synthetic oligonucleotide
aaguuugguuuug

SEQ ID NO: 166163 - RNA, 11 nt, Artificial Sequence
  Description of Artificial Sequence: Synthetic oligonucleotide
uucccacugua

SEQ ID NO: 166164 - RNA, 12 nt, Artificial Sequence
  Description of Artificial Sequence: Synthetic oligonucleotide
gauaccauauga

SEQ ID NO: 166165 - RNA, 10 nt, Artificial Sequence
  Description of Artificial Sequence: Synthetic oligonucleotide
acaugggcug

SEQ ID NO: 166166 - RNA, 12 nt, Artificial Sequence
  Description of Artificial Sequence: Synthetic oligonucleotide
aacuuuuucaua

SEQ ID NO: 166167 - RNA, 11 nt, Artificial Sequence
  Description of Artificial Sequence: Synthetic oligonucleotide
augaggccgga

SEQ ID NO: 166168 - RNA, 10 nt, Artificial Sequence
  Description of Artificial Sequence: Synthetic oligonucleotide
cugcauuugu

SEQ ID NO: 166169 - RNA, 12 nt, Artificial Sequence
  Description of Artificial Sequence: Synthetic oligonucleotide
auguuuacuacc

SEQ ID NO: 166170 - RNA, 14 nt, Artificial Sequence
  Description of Artificial Sequence: Synthetic oligonucleotide
auuuuuugaugaaa

SEQ ID NO: 166171 - RNA, 13 nt, Artificial Sequence
  Description of Artificial Sequence: Synthetic oligonucleotide
agugugugaauuu

SEQ ID NO: 166172 - RNA, 12 nt, Artificial Sequence
  Description of Artificial Sequence: Synthetic oligonucleotide
agcaauguaugu

SEQ ID NO: 166173 - RNA, 13 nt, Artificial Sequence
  Description of Artificial Sequence: Synthetic oligonucleotide
aagcacauauaua

SEQ ID NO: 166174 - RNA, 13 nt, Artificial Sequence
  Description of Artificial Sequence: Synthetic oligonucleotide
uaauaguuucucc

SEQ ID NO: 166175 - RNA, 12 nt, Artificial Sequence
  Description of Artificial Sequence: Synthetic oligonucleotide
guuucuccaaau

SEQ ID NO: 166176 - RNA, 12 nt, Artificial Sequence
  Description of Artificial Sequence: Synthetic oligonucleotide
acuuccuagaaa

SEQ ID NO: 166177 - RNA, 12 nt, Artificial Sequence
  Description of Artificial Sequence: Synthetic oligonucleotide
acaccauauaug

SEQ ID NO: 166178 - RNA, 13 nt, Artificial Sequence
  Description of Artificial Sequence: Synthetic oligonucleotide
uauaugaauggag

SEQ ID NO: 166179 - RNA, 12 nt, Artificial Sequence
  Description of Artificial Sequence: Synthetic oligonucleotide
cauuuacaggga

SEQ ID NO: 166180 - RNA, 12 nt, Artificial Sequence
  Description of Artificial Sequence: Synthetic oligonucleotide
auuuacagggac

SEQ ID NO: 166181 - RNA, 9 nt, Artificial Sequence
  Description of Artificial Sequence: Synthetic oligonucleotide
gggaccuga

SEQ ID NO: 166182 - RNA, 13 nt, Artificial Sequence
  Description of Artificial Sequence: Synthetic oligonucleotide
guuugacugcauc

SEQ ID NO: 166183 - RNA, 12 nt, Artificial Sequence
  Description of Artificial Sequence: Synthetic oligonucleotide
uugacugcaucg

SEQ ID NO: 166184 - RNA, 11 nt, Artificial Sequence
  Description of Artificial Sequence: Synthetic oligonucleotide
aguucacaggg

SEQ ID NO: 166185 - RNA, 12 nt, Artificial Sequence
  Description of Artificial Sequence: Synthetic oligonucleotide
gcaccucugucc

SEQ ID NO: 166186 - RNA, 14 nt, Artificial Sequence
  Description of Artificial Sequence: Synthetic oligonucleotide
guuugucuuuuuaa

SEQ ID NO: 166187 - RNA, 13 nt, Artificial Sequence
  Description of Artificial Sequence: Synthetic oligonucleotide
uugucuuuuuaag

SEQ ID NO: 166188 - RNA, 12 nt, Artificial Sequence
  Description of Artificial Sequence: Synthetic oligonucleotide
cuaaagguuguc

SEQ ID NO: 166189 - RNA, 11 nt, Artificial Sequence
  Description of Artificial Sequence: Synthetic oligonucleotide
agguugucgac

SEQ ID NO: 166190 - RNA, 12 nt, Artificial Sequence
  Description of Artificial Sequence: Synthetic oligonucleotide
ccuggcaauugu

SEQ ID NO: 166191 - RNA, 11 nt, Artificial Sequence
  Description of Artificial Sequence: Synthetic oligonucleotide
guggugcgagg

SEQ ID NO: 166192 - RNA, 12 nt, Artificial Sequence
  Description of Artificial Sequence: Synthetic oligonucleotide
gagacaugaaau

SEQ ID NO: 166193 - RNA, 12 nt, Artificial Sequence
  Description of Artificial Sequence: Synthetic oligonucleotide
uauauuucucca

SEQ ID NO: 166194 - RNA, 9 nt, Artificial Sequence
  Description of Artificial Sequence: Synthetic oligonucleotide
augaaggcu

SEQ ID NO: 166195 - RNA, 10 nt, Artificial Sequence
  Description of Artificial Sequence: Synthetic oligonucleotide
cuggaguggu

SEQ ID NO: 166196 - RNA, 10 nt, Artificial Sequence
  Description of Artificial Sequence: Synthetic oligonucleotide
ggaagagagg

SEQ ID NO: 166197 - RNA, 11 nt, Artificial Sequence
  Description of Artificial Sequence: Synthetic oligonucleotide
uugcaucgggc

SEQ ID NO: 166198 - RNA, 12 nt, Artificial Sequence
  Description of Artificial Sequence: Synthetic oligonucleotide
uauccuacugug

SEQ ID NO: 166199 - RNA, 12 nt, Artificial Sequence
  Description of Artificial Sequence: Synthetic oligonucleotide
ccuacuguguaa

SEQ ID NO: 166200 - RNA, 11 nt, Artificial Sequence
  Description of Artificial Sequence: Synthetic oligonucleotide
cuuguagugua

SEQ ID NO: 166201 - RNA, 12 nt, Artificial Sequence
  Description of Artificial Sequence: Synthetic oligonucleotide
cuuuguugauug

SEQ ID NO: 166202 - RNA, 13 nt, Artificial Sequence
  Description of Artificial Sequence: Synthetic oligonucleotide
uuguugauugaaa

SEQ ID NO: 166203 - RNA, 14 nt, Artificial Sequence
  Description of Artificial Sequence: Synthetic oligonucleotide
ucuuuuucuuccau

SEQ ID NO: 166204 - RNA, 12 nt, Artificial Sequence
  Description of Artificial Sequence: Synthetic oligonucleotide
aucuuccuucua

SEQ ID NO: 166205 - RNA, 12 nt, Artificial Sequence
  Description of Artificial Sequence: Synthetic oligonucleotide
ugaaugcuucau

SEQ ID NO: 166206 - RNA, 12 nt, Artificial Sequence
  Description of Artificial Sequence: Synthetic oligonucleotide
gaaugcuucaug

SEQ ID NO: 166207 - RNA, 12 nt, Artificial Sequence
  Description of Artificial Sequence: Synthetic oligonucleotide
auucuacuuuga

SEQ ID NO: 166208 - RNA, 12 nt, Artificial Sequence
  Description of Artificial Sequence: Synthetic oligonucleotide
gcaacuacagac

SEQ ID NO: 166209 - RNA, 12 nt, Artificial Sequence
  Description of Artificial Sequence: Synthetic oligonucleotide
accaaggucaac

SEQ ID NO: 166210 - RNA, 12 nt, Artificial Sequence
  Description of Artificial Sequence: Synthetic oligonucleotide
gacuaucucgac

SEQ ID NO: 166211 - RNA, 12 nt, Artificial Sequence
  Description of Artificial Sequence: Synthetic oligonucleotide
accuucccaaac

SEQ ID NO: 166212 - RNA, 13 nt, Artificial Sequence
  Description of Artificial Sequence: Synthetic oligonucleotide
caagcuuagaacu

SEQ ID NO: 166213 - RNA, 14 nt, Artificial Sequence
  Description of Artificial Sequence: Synthetic oligonucleotide
gcuuagaacuuuaa

SEQ ID NO: 166214 - RNA, 13 nt, Artificial Sequence
  Description of Artificial Sequence: Synthetic oligonucleotide
aacuuuaagcaac

SEQ ID NO: 166215 - RNA, 10 nt, Artificial Sequence
  Description of Artificial Sequence: Synthetic oligonucleotide
agaccaccac

SEQ ID NO: 166216 - RNA, 13 nt, Artificial Sequence
  Description of Artificial Sequence: Synthetic oligonucleotide
cgagaaauaaagu

SEQ ID NO: 166217 - RNA, 13 nt, Artificial Sequence
  Description of Artificial Sequence: Synthetic oligonucleotide
gagaaauaaaguu

SEQ ID NO: 166218 - RNA, 11 nt, Artificial Sequence
  Description of Artificial Sequence: Synthetic oligonucleotide
ggaaaugaucc

SEQ ID NO: 166219 - RNA, 12 nt, Artificial Sequence
  Description of Artificial Sequence: Synthetic oligonucleotide
aagaaaugaaac

SEQ ID NO: 166220 - RNA, 12 nt, Artificial Sequence
  Description of Artificial Sequence: Synthetic oligonucleotide
uuuccauccucc

SEQ ID NO: 166221 - RNA, 14 nt, Artificial Sequence
  Description of Artificial Sequence: Synthetic oligonucleotide
cugaaaaucuuuga

SEQ ID NO: 166222 - RNA, 10 nt, Artificial Sequence
  Description of Artificial Sequence: Synthetic oligonucleotide
gccguucagg

SEQ ID NO: 166223 - RNA, 12 nt, Artificial Sequence
  Description of Artificial Sequence: Synthetic oligonucleotide
aggguccagaag

SEQ ID NO: 166224 - RNA, 12 nt, Artificial Sequence
  Description of Artificial Sequence: Synthetic oligonucleotide
caagacugcuug

SEQ ID NO: 166225 - RNA, 12 nt, Artificial Sequence
  Description of Artificial Sequence: Synthetic oligonucleotide
ccaugucuuugg

SEQ ID NO: 166226 - RNA, 10 nt, Artificial Sequence
  Description of Artificial Sequence: Synthetic oligonucleotide
ccugaaacac

SEQ ID NO: 166227 - RNA, 11 nt, Artificial Sequence
  Description of Artificial Sequence: Synthetic oligonucleotide
cucuguaccuc

SEQ ID NO: 166228 - RNA, 11 nt, Artificial Sequence
  Description of Artificial Sequence: Synthetic oligonucleotide
gcaagacaaga

SEQ ID NO: 166229 - RNA, 12 nt, Artificial Sequence
  Description of Artificial Sequence: Synthetic oligonucleotide
caagacaagaaa

SEQ ID NO: 166230 - RNA, 11 nt, Artificial Sequence
  Description of Artificial Sequence: Synthetic oligonucleotide
guacaagaucc

SEQ ID NO: 166231 - RNA, 11 nt, Artificial Sequence
  Description of Artificial Sequence: Synthetic oligonucleotide
guacuugcaga

SEQ ID NO: 166232 - RNA, 12 nt, Artificial Sequence
  Description of Artificial Sequence: Synthetic oligonucleotide
gaucgauacaga

SEQ ID NO: 166233 - RNA, 12 nt, Artificial Sequence
  Description of Artificial Sequence: Synthetic oligonucleotide
auaaaaauaaau

SEQ ID NO: 166234 - RNA, 12 nt, Artificial Sequence
  Description of Artificial Sequence: Synthetic oligonucleotide
aaaaauaaauau

SEQ ID NO: 166235 - RNA, 12 nt, Artificial Sequence
  Description of Artificial Sequence: Synthetic oligonucleotide
uugacugcugug

SEQ ID NO: 166236 - RNA, 12 nt, Artificial Sequence
  Description of Artificial Sequence: Synthetic oligonucleotide
gagaugagagac

SEQ ID NO: 166237 - RNA, 9 nt, Artificial Sequence
  Description of Artificial Sequence: Synthetic oligonucleotide
cccacuugg

SEQ ID NO: 166238 - RNA, 2005 nt, Homo sapiens
cuggcgcgcgcggcccugcgggugacaggcaggcgggaaggggcggggccucgggcggggccgccguggggaggagggcggugggaggggaggaguggagauggcggcggcggcggcucaggggggcgggggcggggagccccguagaaccgagggggucggcccgggggucccgggggagguggagauggugaaggggcagccguucgacgugggcccgcgcuacacgcaguugcaguacaucggcgagggcgcguacggcauggucagcucggccuaugaccacgugcgcaagacucgcguggccaucaagaagaucagccccuucgaacaucagaccuacugccagcgcacgcuccgggagauccagauccugcugcgcuuccgccaugagaaugucaucggcauccgagacauucugcgggcguccacccuggaagccaugagagaugucuacauugugcaggaccugauggagacugaccuguacaaguugcugaaaagccagcagcugagcaaugaccauaucugcuacuuccucuaccagauccugcggggccucaaguacauccacuccgccaacgugcuccaccgagaucuaaagcccuccaaccugcucaucaacaccaccugcgaccuuaagauuugugauuucggccuggcccggauugccgauccugagcaugaccacaccggcuuccugacggaguauguggcuacgcgcugguaccgggccccagagaucaugcugaacuccaagggcuauaccaaguccaucgacaucuggucugugggcugcauucuggcugagaugcucucuaaccggcccaucuucccuggcaagcacuaccuggaucagcucaaccacauucugggcauccugggcuccccaucccaggaggaccugaauuguaucaucaacaugaaggcccgaaacuaccuacagucucugcccuccaagaccaagguggcuugggccaagcuuuuccccaagucagacuccaaagcccuugaccugcuggaccggauguuaaccuuuaaccccaauaaacggaucacaguggaggaagcgcuggcucaccccuaccuggagcaguacuaugacccgacggaugaggugggccaguccccagcagcaguggggcugggggcaggggagcaggggggcacguaggcaucccccaugccaggccugagccuugcugucucuaccaccccagccaguggccgaggagcccuucaccuucgccauggagcuggaugaccuaccuaaggagcggcugaaggagcucaucuuccaggagacagcacgcuuccagcccggagugcuggaggcccccuagcccagacagacaucucugcacccuggggccuggaccugccuccugccugccccucucccgccagacuguuagaaaauggacacugugcccagcccggaccuuggcagcccaggccgggguggagcaugggccuggccaccucucuccuuugcugaggccuccagcuucaggcaggccaaggccuucuccuccccacccgcccuccccacggggccucgggaccucagguggccccaguucaaucucccgcugcugcugcugcgcccuuaccuuccccagcgucccagucucuggcaguucuggaauggaaggguucuggcugccccaaccugcugaagggcagagguggaggguggggggcgcugaguagggacucagggccaugccugccccccucaucucauucaaaccccacccuaguuucccugaaggaacauuccuuagucucaagggcuagcaucccugaggagccaggccgggccgaauccccucccugucaaagcugucacuucgcgugcccucgcugcuucuguguguggugagcagaaguggagcuggggggcguggagagcccggcgccccugccaccucccugacccgucuaauauauaaauauagagaugugucuauggcugaaaaaaaaaaaaaaaaaaaaaaaaaaa

SEQ ID NO: 166239 - RNA, 1902 nt, Homo sapiens
cuggcgcgcgcggcccugcgggugacaggcaggcgggaaggggcggggccucgggcggggccgccguggggaggagggcggugggaggggaggaguggagauggcggcggcggcggcucaggggggcgggggcggggagccccguagaaccgagggggucggcccgggggucccgggggagguggagauggugaaggggcagccguucgacgugggcccgcgcuacacgcaguugcaguacaucggcgagggcgcguacggcauggucagcucggccuaugaccacgugcgcaagacucgcguggccaucaagaagaucagccccuucgaacaucagaccuacugccagcgcacgcuccgggagauccagauccugcugcgcuuccgccaugagaaugucaucggcauccgagacauucugcgggcguccacccuggaagccaugagagaugucuacauugugcaggaccugauggagacugaccuguacaaguugcugaaaagccagcagcugagcaaugaccauaucugcuacuuccucuaccagauccugcggggccucaaguacauccacuccgccaacgugcuccaccgagaucuaaagcccuccaaccugcucaucaacaccaccugcgaccuuaagauuugugauuucggccuggcccggauugccgauccugagcaugaccacaccggcuuccugacggaguauguggcuacgcgcugguaccgggccccagagaucaugcugaacuccaagggcuauaccaaguccaucgacaucuggucugugggcugcauucuggcugagaugcucucuaaccggcccaucuucccuggcaagcacuaccuggaucagcucaaccacauucugggcauccugggcuccccaucccaggaggaccugaauuguaucaucaacaugaaggcccgaaacuaccuacagucucugcccuccaagaccaagguggcuugggccaagcuuuuccccaagucagacuccaaagcccuugaccugcuggaccggauguuaaccuuuaaccccaauaaacggaucacaguggaggaagcgcuggcucaccccuaccuggagcaguacuaugacccgacggaugagccaguggccgaggagcccuucaccuucgccauggagcuggaugaccuaccuaaggagcggcugaaggagcucaucuuccaggagacagcacgcuuccagcccggagugcuggaggcccccuagcccagacagacaucucugcacccuggggccuggaccugccuccugccugccccucucccgccagacuguuagaaaauggacacugugcccagcccggaccuuggcagcccaggccgggguggagcaugggccuggccaccucucuccuuugcugaggccuccagcuucaggcaggccaaggccuucuccuccccacccgcccuccccacggggccucgggaccucagguggccccaguucaaucucccgcugcugcugcugcgcccuuaccuuccccagcgucccagucucuggcaguucuggaauggaaggguucuggcugccccaaccugcugaagggcagagguggaggguggggggcgcugaguagggacucagggccaugccugccccccucaucucauucaaaccccacccuaguuucccugaaggaacauuccuuagucucaagggcuagcaucccugaggagccaggccgggccgaauccccucccugucaaagcugucacuucgcgugcccucgcugcuucuguguguggugagcagaaguggagcuggggggcguggagagcccggcgccccugccaccucccugacccgucuaauauauaaauauagagaugugucuauggcugaaaaaaaaaaaaaaaaaaaaaaaaaaa

SEQ ID NO: 166240 - RNA, 1770 nt, Homo sapiens
cuggcgcgcgcggcccugcgggugacaggcaggcgggaaggggcggggccucgggcggggccgccguggggaggagggcggugggaggggaggaguggagauggcggcggcggcggcucaggggggcgggggcggggagccccguagaaccgagggggucggcccgggggucccgggggagguggagauggugaaggggcagccguucgacgugggcccgcgcuacacgcaguugcaguacaucggcgagggcgcguacggcauggucagcucggccuaugaccacgugcgcaagacucgcguggccaucaagaagaucagccccuucgaacaucagaccuacugccagcgcacgcuccgggagauccagauccugcugcgcuuccgccaugagaaugucaucggcauccgagacauucugcgggcguccacccuggaagccaugagagaugucuacauugugcaggaccugauggagacugaccuguacaaguugcugaaaagccagcagcugagcaaugaccauaucugcuacuuccucuaccagauccugcggggccucaaguacauccacuccgccaacgugcuccaccgagaucuaaagcccuccaaccugcucaucaacaccaccugcgaccuuaagauuugugauuucggccuggcccggauugccgauccugagcaugaccacaccggcuuccugacggaguauguggcuacgcgcugguaccgggccccagagaucaugcugaacuccaagggcuauaccaaguccaucgacaucuggucugugggcugcauucuggcugagaugcucucuaaccggcccaucuucccuggcaagcacuaccuggaucagcucaaccacauucuggcccuugaccugcuggaccggauguuaaccuuuaaccccaauaaacggaucacaguggaggaagcgcuggcucaccccuaccuggagcaguacuaugacccgacggaugagccaguggccgaggagcccuucaccuucgccauggagcuggaugaccuaccuaaggagcggcugaaggagcucaucuuccaggagacagcacgcuuccagcccggagugcuggaggcccccuagcccagacagacaucucugcacccuggggccuggaccugccuccugccugccccucucccgccagacuguuagaaaauggacacugugcccagcccggaccuuggcagcccaggccgggguggagcaugggccuggccaccucucuccuuugcugaggccuccagcuucaggcaggccaaggccuucuccuccccacccgcccuccccacggggccucgggaccucagguggccccaguucaaucucccgcugcugcugcugcgcccuuaccuuccccagcgucccagucucuggcaguucuggaauggaaggguucuggcugccccaaccugcugaagggcagagguggaggguggggggcgcugaguagggacucagggccaugccugccccccucaucucauucaaaccccacccuaguuucccugaaggaacauuccuuagucucaagggcuagcaucccugaggagccaggccgggccgaauccccucccugucaaagcugucacuucgcgugcccucgcugcuucuguguguggugagcagaaguggagcuggggggcguggagagcccggcgccccugccaccucccugacccgucuaauauauaaauauagagaugugucuauggcugaaaaaaaaaaaaaaaaaaaaaaaaaaa

SEQ ID NO: 166241 - RNA, 19 nt, Artificial Sequence
  Description of Artificial Sequence: Synthetic oligonucleotide
cuggcgcgcgcggcccugc

SEQ ID NO: 166242 - RNA, 19 nt, Artificial Sequence
  Description of Artificial Sequence: Synthetic oligonucleotide
cgggugacaggcaggcggg

SEQ ID NO: 166243 - RNA, 19 nt, Artificial Sequence
  Description of Artificial Sequence: Synthetic oligonucleotide
gaaggggcggggccucggg

SEQ ID NO: 166244 - RNA, 19 nt, Artificial Sequence
  Description of Artificial Sequence: Synthetic oligonucleotide
gcggggccgccguggggag

SEQ ID NO: 166245 - RNA, 19 nt, Artificial Sequence
  Description of Artificial Sequence: Synthetic oligonucleotide
ggagggcggugggagggga

SEQ ID NO: 166246 - RNA, 19 nt, Artificial Sequence
  Description of Artificial Sequence: Synthetic oligonucleotide
aggaguggagauggcggcg

SEQ ID NO: 166247 - RNA, 19 nt, Artificial Sequence
  Description of Artificial Sequence: Synthetic oligonucleotide
ggcggcggcucaggggggc

SEQ ID NO: 166248 - RNA, 19 nt, Artificial Sequence
  Description of Artificial Sequence: Synthetic oligonucleotide
cgggggcggggagccccgu

SEQ ID NO: 166249 - RNA, 19 nt, Artificial Sequence
  Description of Artificial Sequence: Synthetic oligonucleotide
uagaaccgagggggucggc

SEQ ID NO: 166250 - RNA, 19 nt, Artificial Sequence
  Description of Artificial Sequence: Synthetic oligonucleotide
cccgggggucccgggggag

SEQ ID NO: 166251 - RNA, 19 nt, Artificial Sequence
  Description of Artificial Sequence: Synthetic oligonucleotide
gguggagauggugaagggg

SEQ ID NO: 166252 - RNA, 19 nt, Artificial Sequence
  Description of Artificial Sequence: Synthetic oligonucleotide
gcagccguucgacgugggc

SEQ ID NO: 166253 - RNA, 19 nt, Artificial Sequence
  Description of Artificial Sequence: Synthetic oligonucleotide
cccgcgcuacacgcaguug

SEQ ID NO: 166254 - RNA, 19 nt, Artificial Sequence
  Description of Artificial Sequence: Synthetic oligonucleotide
gcaguacaucggcgagggc

SEQ ID NO: 166255 - RNA, 19 nt, Artificial Sequence
  Description of Artificial Sequence: Synthetic oligonucleotide
cgcguacggcauggucagc

SEQ ID NO: 166256 - RNA, 19 nt, Artificial Sequence
  Description of Artificial Sequence: Synthetic oligonucleotide
cucggccuaugaccacgug

SEQ ID NO: 166257 - RNA, 19 nt, Artificial Sequence
  Description of Artificial Sequence: Synthetic oligonucleotide
gcgcaagacucgcguggcc

SEQ ID NO: 166258 - RNA, 19 nt, Artificial Sequence
  Description of Artificial Sequence: Synthetic oligonucleotide
caucaagaagaucagcccc

SEQ ID NO: 166259 - RNA, 19 nt, Artificial Sequence
  Description of Artificial Sequence: Synthetic oligonucleotide
cuucgaacaucagaccuac

SEQ ID NO: 166260 - RNA, 19 nt, Artificial Sequence
  Description of Artificial Sequence: Synthetic oligonucleotide
cugccagcgcacgcuccgg

SEQ ID NO: 166261 - RNA, 19 nt, Artificial Sequence
  Description of Artificial Sequence: Synthetic oligonucleotide
ggagauccagauccugcug

SEQ ID NO: 166262 - RNA, 19 nt, Artificial Sequence
  Description of Artificial Sequence: Synthetic oligonucleotide
gcgcuuccgccaugagaau

SEQ ID NO: 166263 - RNA, 19 nt, Artificial Sequence
  Description of Artificial Sequence: Synthetic oligonucleotide
ugucaucggcauccgagac

SEQ ID NO: 166264 - RNA, 19 nt, Artificial Sequence
  Description of Artificial Sequence: Synthetic oligonucleotide
cauucugcgggcguccacc

SEQ ID NO: 166265 - RNA, 19 nt, Artificial Sequence
  Description of Artificial Sequence: Synthetic oligonucleotide
ccuggaagccaugagagau

SEQ ID NO: 166266 - RNA, 19 nt, Artificial Sequence
  Description of Artificial Sequence: Synthetic oligonucleotide
ugucuacauugugcaggac

SEQ ID NO: 166267 - RNA, 19 nt, Artificial Sequence
  Description of Artificial Sequence: Synthetic oligonucleotide
ccugauggagacugaccug

SEQ ID NO: 166268 - RNA, 19 nt, Artificial Sequence
  Description of Artificial Sequence: Synthetic oligonucleotide
guacaaguugcugaaaagc

SEQ ID NO: 166269 - RNA, 19 nt, Artificial Sequence
  Description of Artificial Sequence: Synthetic oligonucleotide
ccagcagcugagcaaugac

SEQ ID NO: 166270 - RNA, 19 nt, Artificial Sequence
  Description of Artificial Sequence: Synthetic oligonucleotide
ccauaucugcuacuuccuc

SEQ ID NO: 166271 - RNA, 19 nt, Artificial Sequence
  Description of Artificial Sequence: Synthetic oligonucleotide
cuaccagauccugcggggc

SEQ ID NO: 166272 - RNA, 19 nt, Artificial Sequence
  Description of Artificial Sequence: Synthetic oligonucleotide
ccucaaguacauccacucc

SEQ ID NO: 166273 - RNA, 19 nt, Artificial Sequence
  Description of Artificial Sequence: Synthetic oligonucleotide
cgccaacgugcuccaccga

SEQ ID NO: 166274 - RNA, 19 nt, Artificial Sequence
  Description of Artificial Sequence: Synthetic oligonucleotide
agaucuaaagcccuccaac

SEQ ID NO: 166275 - RNA, 19 nt, Artificial Sequence
  Description of Artificial Sequence: Synthetic oligonucleotide
ccugcucaucaacaccacc

SEQ ID NO: 166276 - RNA, 19 nt, Artificial Sequence
  Description of Artificial Sequence: Synthetic oligonucleotide
cugcgaccuuaagauuugu

SEQ ID NO: 166277 - RNA, 19 nt, Artificial Sequence
  Description of Artificial Sequence: Synthetic oligonucleotide
ugauuucggccuggcccgg

SEQ ID NO: 166278 - RNA, 19 nt, Artificial Sequence
  Description of Artificial Sequence: Synthetic oligonucleotide
gauugccgauccugagcau

SEQ ID NO: 166279 - RNA, 19 nt, Artificial Sequence
  Description of Artificial Sequence: Synthetic oligonucleotide
ugaccacaccggcuuccug

SEQ ID NO: 166280 - RNA, 19 nt, Artificial Sequence
  Description of Artificial Sequence: Synthetic oligonucleotide
gacggaguauguggcuacg

SEQ ID NO: 166281 - RNA, 19 nt, Artificial Sequence
  Description of Artificial Sequence: Synthetic oligonucleotide
gcgcugguaccgggcccca

SEQ ID NO: 166282 - RNA, 19 nt, Artificial Sequence
  Description of Artificial Sequence: Synthetic oligonucleotide
agagaucaugcugaacucc

SEQ ID NO: 166283 - RNA, 19 nt, Artificial Sequence
  Description of Artificial Sequence: Synthetic oligonucleotide
caagggcuauaccaagucc

SEQ ID NO: 166284 - RNA, 19 nt, Artificial Sequence
  Description of Artificial Sequence: Synthetic oligonucleotide
caucgacaucuggucugug

SEQ ID NO: 166285 - RNA, 19 nt, Artificial Sequence
  Description of Artificial Sequence: Synthetic oligonucleotide
gggcugcauucuggcugag

SEQ ID NO: 166286 - RNA, 19 nt, Artificial Sequence
  Description of Artificial Sequence: Synthetic oligonucleotide
gaugcucucuaaccggccc

SEQ ID NO: 166287 - RNA, 19 nt, Artificial Sequence
  Description of Artificial Sequence: Synthetic oligonucleotide
caucuucccuggcaagcac

SEQ ID NO: 166288 - RNA, 19 nt, Artificial Sequence
  Description of Artificial Sequence: Synthetic oligonucleotide
cuaccuggaucagcucaac

SEQ ID NO: 166289 - RNA, 19 nt, Artificial Sequence
  Description of Artificial Sequence: Synthetic oligonucleotide
ccacauucugggcauccug

SEQ ID NO: 166290 - RNA, 19 nt, Artificial Sequence
  Description of Artificial Sequence: Synthetic oligonucleotide
gggcuccccaucccaggag

SEQ ID NO: 166291 - RNA, 19 nt, Artificial Sequence
  Description of Artificial Sequence: Synthetic oligonucleotide
ggaccugaauuguaucauc

SEQ ID NO: 166292 - RNA, 19 nt, Artificial Sequence
  Description of Artificial Sequence: Synthetic oligonucleotide
caacaugaaggcccgaaac

SEQ ID NO: 166293 - RNA, 19 nt, Artificial Sequence
  Description of Artificial Sequence: Synthetic oligonucleotide
cuaccuacagucucugccc

SEQ ID NO: 166294 - RNA, 19 nt, Artificial Sequence
  Description of Artificial Sequence: Synthetic oligonucleotide
cuccaagaccaagguggcu

SEQ ID NO: 166295 - RNA, 19 nt, Artificial Sequence
  Description of Artificial Sequence: Synthetic oligonucleotide
uugggccaagcuuuucccc

SEQ ID NO: 166296 - RNA, 19 nt, Artificial Sequence
  Description of Artificial Sequence: Synthetic oligonucleotide
caagucagacuccaaagcc

SEQ ID NO: 166297 - RNA, 19 nt, Artificial Sequence
  Description of Artificial Sequence: Synthetic oligonucleotide
ccuugaccugcuggaccgg

SEQ ID NO: 166298 - RNA, 19 nt, Artificial Sequence
  Description of Artificial Sequence: Synthetic oligonucleotide
gauguuaaccuuuaacccc

SEQ ID NO: 166299 - RNA, 19 nt, Artificial Sequence
  Description of Artificial Sequence: Synthetic oligonucleotide
caauaaacggaucacagug

SEQ ID NO: 166300 - RNA, 19 nt, Artificial Sequence
  Description of Artificial Sequence: Synthetic oligonucleotide
ggaggaagcgcuggcucac

SEQ ID NO: 166301 - RNA, 19 nt, Artificial Sequence
  Description of Artificial Sequence: Synthetic oligonucleotide
ccccuaccuggagcaguac

SEQ ID NO: 166302 - RNA, 19 nt, Artificial Sequence
  Description of Artificial Sequence: Synthetic oligonucleotide
cuaugacccgacggaugag

SEQ ID NO: 166303 - RNA, 19 nt, Artificial Sequence
  Description of Artificial Sequence: Synthetic oligonucleotide
gccaguggccgaggagccc

SEQ ID NO: 166304 - RNA, 19 nt, Artificial Sequence
  Description of Artificial Sequence: Synthetic oligonucleotide
cuucaccuucgccauggag

SEQ ID NO: 166305 - RNA, 19 nt, Artificial Sequence
  Description of Artificial Sequence: Synthetic oligonucleotide
gcuggaugaccuaccuaag

SEQ ID NO: 166306 - RNA, 19 nt, Artificial Sequence
  Description of Artificial Sequence: Synthetic oligonucleotide
ggagcggcugaaggagcuc

SEQ ID NO: 166307 - RNA, 19 nt, Artificial Sequence
  Description of Artificial Sequence: Synthetic oligonucleotide
caucuuccaggagacagca

SEQ ID NO: 166308 - RNA, 19 nt, Artificial Sequence
  Description of Artificial Sequence: Synthetic oligonucleotide
acgcuuccagcccggagug

SEQ ID NO: 166309 - RNA, 19 nt, Artificial Sequence
  Description of Artificial Sequence: Synthetic oligonucleotide
gcuggaggcccccuagccc

SEQ ID NO: 166310 - RNA, 19 nt, Artificial Sequence
  Description of Artificial Sequence: Synthetic oligonucleotide
cagacagacaucucugcac

SEQ ID NO: 166311 - RNA, 19 nt, Artificial Sequence
  Description of Artificial Sequence: Synthetic oligonucleotide
cccuggggccuggaccugc

SEQ ID NO: 166312 - RNA, 19 nt, Artificial Sequence
  Description of Artificial Sequence: Synthetic oligonucleotide
ccuccugccugccccucuc

SEQ ID NO: 166313 - RNA, 19 nt, Artificial Sequence
  Description of Artificial Sequence: Synthetic oligonucleotide
cccgccagacuguuagaaa

SEQ ID NO: 166314 - RNA, 19 nt, Artificial Sequence
  Description of Artificial Sequence: Synthetic oligonucleotide
aauggacacugugcccagc

SEQ ID NO: 166315 - RNA, 19 nt, Artificial Sequence
  Description of Artificial Sequence: Synthetic oligonucleotide
cccggaccuuggcagccca

SEQ ID NO: 166316 - RNA, 19 nt, Artificial Sequence
  Description of Artificial Sequence: Synthetic oligonucleotide
aggccgggguggagcaugg

SEQ ID NO: 166317 - RNA, 19 nt, Artificial Sequence
  Description of Artificial Sequence: Synthetic oligonucleotide
ggccuggccaccucucucc

SEQ ID NO: 166318 - RNA, 19 nt, Artificial Sequence
  Description of Artificial Sequence: Synthetic oligonucleotide
cuuugcugaggccuccagc

SEQ ID NO: 166319 - RNA, 19 nt, Artificial Sequence
  Description of Artificial Sequence: Synthetic oligonucleotide
cuucaggcaggccaaggcc

SEQ ID NO: 166320 - RNA, 19 nt, Artificial Sequence
  Description of Artificial Sequence: Synthetic oligonucleotide
cuucuccuccccacccgcc

SEQ ID NO: 166321 - RNA, 19 nt, Artificial Sequence
  Description of Artificial Sequence: Synthetic oligonucleotide
ccuccccacggggccucgg

SEQ ID NO: 166322 - RNA, 19 nt, Artificial Sequence
  Description of Artificial Sequence: Synthetic oligonucleotide
ggaccucagguggccccag

SEQ ID NO: 166323 - RNA, 19 nt, Artificial Sequence
  Description of Artificial Sequence: Synthetic oligonucleotide
guucaaucucccgcugcug

SEQ ID NO: 166324 - RNA, 19 nt, Artificial Sequence
  Description of Artificial Sequence: Synthetic oligonucleotide
gcugcugcgcccuuaccuu

SEQ ID NO: 166325 - RNA, 19 nt, Artificial Sequence
  Description of Artificial Sequence: Synthetic oligonucleotide
uccccagcgucccagucuc

SEQ ID NO: 166326 - RNA, 19 nt, Artificial Sequence
  Description of Artificial Sequence: Synthetic oligonucleotide
cuggcaguucuggaaugga

SEQ ID NO: 166327 - RNA, 19 nt, Artificial Sequence
  Description of Artificial Sequence: Synthetic oligonucleotide
aaggguucuggcugcccca

SEQ ID NO: 166328 - RNA, 19 nt, Artificial Sequence
  Description of Artificial Sequence: Synthetic oligonucleotide
aaccugcugaagggcagag

SEQ ID NO: 166329 - RNA, 19 nt, Artificial Sequence
  Description of Artificial Sequence: Synthetic oligonucleotide
gguggaggguggggggcgc

SEQ ID NO: 166330 - RNA, 19 nt, Artificial Sequence
  Description of Artificial Sequence: Synthetic oligonucleotide
cugaguagggacucagggc

SEQ ID NO: 166331 - RNA, 19 nt, Artificial Sequence
  Description of Artificial Sequence: Synthetic oligonucleotide
ccaugccugccccccucau

SEQ ID NO: 166332 - RNA, 19 nt, Artificial Sequence
  Description of Artificial Sequence: Synthetic oligonucleotide
ucucauucaaaccccaccc

SEQ ID NO: 166333 - RNA, 19 nt, Artificial Sequence
  Description of Artificial Sequence: Synthetic oligonucleotide
cuaguuucccugaaggaac

SEQ ID NO: 166334 - RNA, 19 nt, Artificial Sequence
  Description of Artificial Sequence: Synthetic oligonucleotide
cauuccuuagucucaaggg

SEQ ID NO: 166335 - RNA, 19 nt, Artificial Sequence
  Description of Artificial Sequence: Synthetic oligonucleotide
gcuagcaucccugaggagc

SEQ ID NO: 166336 - RNA, 19 nt, Artificial Sequence
  Description of Artificial Sequence: Synthetic oligonucleotide
ccaggccgggccgaauccc

SEQ ID NO: 166337 - RNA, 19 nt, Artificial Sequence
  Description of Artificial Sequence: Synthetic oligonucleotide
ccucccugucaaagcuguc

SEQ ID NO: 166338 - RNA, 19 nt, Artificial Sequence
  Description of Artificial Sequence: Synthetic oligonucleotide
cacuucgcgugcccucgcu

SEQ ID NO: 166339 - RNA, 19 nt, Artificial Sequence
  Description of Artificial Sequence: Synthetic oligonucleotide
ugcuucuguguguggugag

SEQ ID NO: 166340 - RNA, 19 nt, Artificial Sequence
  Description of Artificial Sequence: Synthetic oligonucleotide
gcagaaguggagcuggggg

SEQ ID NO: 166341 - RNA, 19 nt, Artificial Sequence
  Description of Artificial Sequence: Synthetic oligonucleotide
ggcguggagagcccggcgc

SEQ ID NO: 166342 - RNA, 19 nt, Artificial Sequence
  Description of Artificial Sequence: Synthetic oligonucleotide
ccccugccaccucccugac

SEQ ID NO: 166343 - RNA, 19 nt, Artificial Sequence
  Description of Artificial Sequence: Synthetic oligonucleotide
cccgucuaauauauaaaua

SEQ ID NO: 166344 - RNA, 19 nt, Artificial Sequence
  Description of Artificial Sequence: Synthetic oligonucleotide
auagagaugugucuauggc

SEQ ID NO: 166345 - RNA, 19 nt, Artificial Sequence
  Description of Artificial Sequence: Synthetic oligonucleotide
ccacauucuggcccuugac

SEQ ID NO: 166346 - RNA, 19 nt, Artificial Sequence
  Description of Artificial Sequence: Synthetic oligonucleotide
ccugcuggaccggauguua

SEQ ID NO: 166347 - RNA, 19 nt, Artificial Sequence
  Description of Artificial Sequence: Synthetic oligonucleotide
aaccuuuaaccccaauaaa

SEQ ID NO: 166348 - RNA, 19 nt, Artificial Sequence
  Description of Artificial Sequence: Synthetic oligonucleotide
acggaucacaguggaggaa

SEQ ID NO: 166349 - RNA, 19 nt, Artificial Sequence
  Description of Artificial Sequence: Synthetic oligonucleotide
agcgcuggcucaccccuac

SEQ ID NO: 166350 - RNA, 19 nt, Artificial Sequence
  Description of Artificial Sequence: Synthetic oligonucleotide
ccuggagcaguacuaugac

SEQ ID NO: 166351 - RNA, 19 nt, Artificial Sequence
  Description of Artificial Sequence: Synthetic oligonucleotide
cccgacggaugagccagug

SEQ ID NO: 166352 - RNA, 19 nt, Artificial Sequence
  Description of Artificial Sequence: Synthetic oligonucleotide
ggccgaggagcccuucacc

SEQ ID NO: 166353 - RNA, 19 nt, Artificial Sequence
  Description of Artificial Sequence: Synthetic oligonucleotide
cuucgccauggagcuggau

SEQ ID NO: 166354 - RNA, 19 nt, Artificial Sequence
  Description of Artificial Sequence: Synthetic oligonucleotide
ugaccuaccuaaggagcgg

SEQ ID NO: 166355 - RNA, 19 nt, Artificial Sequence
  Description of Artificial Sequence: Synthetic oligonucleotide
gcugaaggagcucaucuuc

SEQ ID NO: 166356 - RNA, 19 nt, Artificial Sequence
  Description of Artificial Sequence: Synthetic oligonucleotide
ccaggagacagcacgcuuc

SEQ ID NO: 166357 - RNA, 19 nt, Artificial Sequence
  Description of Artificial Sequence: Synthetic oligonucleotide
ccagcccggagugcuggag

SEQ ID NO: 166358 - RNA, 19 nt, Artificial Sequence
  Description of Artificial Sequence: Synthetic oligonucleotide
ggcccccuagcccagacag

SEQ ID NO: 166359 - RNA, 19 nt, Artificial Sequence
  Description of Artificial Sequence: Synthetic oligonucleotide
gacaucucugcacccuggg

SEQ ID NO: 166360 - RNA, 19 nt, Artificial Sequence
  Description of Artificial Sequence: Synthetic oligonucleotide
ggccuggaccugccuccug

SEQ ID NO: 166361 - RNA, 19 nt, Artificial Sequence
  Description of Artificial Sequence: Synthetic oligonucleotide
gccugccccucucccgcca

SEQ ID NO: 166362 - RNA, 19 nt, Artificial Sequence
  Description of Artificial Sequence: Synthetic oligonucleotide
agacuguuagaaaauggac

SEQ ID NO: 166363 - RNA, 19 nt, Artificial Sequence
  Description of Artificial Sequence: Synthetic oligonucleotide
cacugugcccagcccggac

SEQ ID NO: 166364 - RNA, 19 nt, Artificial Sequence
  Description of Artificial Sequence: Synthetic oligonucleotide
ccuuggcagcccaggccgg

SEQ ID NO: 166365 - RNA, 19 nt, Artificial Sequence
  Description of Artificial Sequence: Synthetic oligonucleotide
ggguggagcaugggccugg

SEQ ID NO: 166366 - RNA, 19 nt, Artificial Sequence
  Description of Artificial Sequence: Synthetic oligonucleotide
gccaccucucuccuuugcu

SEQ ID NO: 166367 - RNA, 19 nt, Artificial Sequence
  Description of Artificial Sequence: Synthetic oligonucleotide
ugaggccuccagcuucagg

SEQ ID NO: 166368 - RNA, 19 nt, Artificial Sequence
  Description of Artificial Sequence: Synthetic oligonucleotide
gcaggccaaggccuucucc

SEQ ID NO: 166369 - RNA, 19 nt, Artificial Sequence
  Description of Artificial Sequence: Synthetic oligonucleotide
cuccccacccgcccucccc

SEQ ID NO: 166370 - RNA, 19 nt, Artificial Sequence
  Description of Artificial Sequence: Synthetic oligonucleotide
cacggggccucgggaccuc

SEQ ID NO: 166371 - RNA, 19 nt, Artificial Sequence
  Description of Artificial Sequence: Synthetic oligonucleotide
cagguggccccaguucaau

SEQ ID NO: 166372 - RNA, 19 nt, Artificial Sequence
  Description of Artificial Sequence: Synthetic oligonucleotide
ucucccgcugcugcugcug

SEQ ID NO: 166373 - RNA, 19 nt, Artificial Sequence
  Description of Artificial Sequence: Synthetic oligonucleotide
gcgcccuuaccuuccccag

SEQ ID NO: 166374 - RNA, 19 nt, Artificial Sequence
  Description of Artificial Sequence: Synthetic oligonucleotide
gcgucccagucucuggcag

SEQ ID NO: 166375 - RNA, 19 nt, Artificial Sequence
  Description of Artificial Sequence: Synthetic oligonucleotide
guucuggaauggaaggguu

SEQ ID NO: 166376 - RNA, 19 nt, Artificial Sequence
  Description of Artificial Sequence: Synthetic oligonucleotide
ucuggcugccccaaccugc

SEQ ID NO: 166377 - RNA, 19 nt, Artificial Sequence
  Description of Artificial Sequence: Synthetic oligonucleotide
cugaagggcagagguggag

SEQ ID NO: 166378 - RNA, 19 nt, Artificial Sequence
  Description of Artificial Sequence: Synthetic oligonucleotide
ggguggggggcgcugagua

SEQ ID NO: 166379 - RNA, 19 nt, Artificial Sequence
  Description of Artificial Sequence: Synthetic oligonucleotide
agggacucagggccaugcc

SEQ ID NO: 166380 - RNA, 19 nt, Artificial Sequence
  Description of Artificial Sequence: Synthetic oligonucleotide
cugccccccucaucucauu

SEQ ID NO: 166381 - RNA, 19 nt, Artificial Sequence
  Description of Artificial Sequence: Synthetic oligonucleotide
ucaaaccccacccuaguuu

SEQ ID NO: 166382 - RNA, 19 nt, Artificial Sequence
  Description of Artificial Sequence: Synthetic oligonucleotide
ucccugaaggaacauuccu

SEQ ID NO: 166383 - RNA, 19 nt, Artificial Sequence
  Description of Artificial Sequence: Synthetic oligonucleotide
uuagucucaagggcuagca

SEQ ID NO: 166384 - RNA, 19 nt, Artificial Sequence
  Description of Artificial Sequence: Synthetic oligonucleotide
aucccugaggagccaggcc

SEQ ID NO: 166385 - RNA, 19 nt, Artificial Sequence
  Description of Artificial Sequence: Synthetic oligonucleotide
cgggccgaauccccucccu

SEQ ID NO: 166386 - RNA, 19 nt, Artificial Sequence
  Description of Artificial Sequence: Synthetic oligonucleotide
ugucaaagcugucacuucg

SEQ ID NO: 166387 - RNA, 19 nt, Artificial Sequence
  Description of Artificial Sequence: Synthetic oligonucleotide
gcgugcccucgcugcuucu

SEQ ID NO: 166388 - RNA, 19 nt, Artificial Sequence
  Description of Artificial Sequence: Synthetic oligonucleotide
uguguguggugagcagaag

SEQ ID NO: 166389 - RNA, 19 nt, Artificial Sequence
  Description of Artificial Sequence: Synthetic oligonucleotide
guggagcuggggggcgugg

SEQ ID NO: 166390 - RNA, 19 nt, Artificial Sequence
  Description of Artificial Sequence: Synthetic oligonucleotide
gagagcccggcgccccugc

SEQ ID NO: 166391 - RNA, 19 nt, Artificial Sequence
  Description of Artificial Sequence: Synthetic oligonucleotide
ccaccucccugacccgucu

SEQ ID NO: 166392 - RNA, 19 nt, Artificial Sequence
  Description of Artificial Sequence: Synthetic oligonucleotide
uaauauauaaauauagaga

SEQ ID NO: 166393 - RNA, 19 nt, Artificial Sequence
  Description of Artificial Sequence: Synthetic oligonucleotide
augugucuauggcugaaaa

SEQ ID NO: 166394 - RNA, 19 nt, Artificial Sequence
  Description of Artificial Sequence: Synthetic oligonucleotide
ggugggccaguccccagca

SEQ ID NO: 166395 - RNA, 19 nt, Artificial Sequence
  Description of Artificial Sequence: Synthetic oligonucleotide
agcaguggggcugggggca

SEQ ID NO: 166396 - RNA, 19 nt, Artificial Sequence
  Description of Artificial Sequence: Synthetic oligonucleotide
aggggagcaggggggcacg

SEQ ID NO: 166397 - RNA, 19 nt, Artificial Sequence
  Description of Artificial Sequence: Synthetic oligonucleotide
guaggcaucccccaugcca

SEQ ID NO: 166398 - RNA, 19 nt, Artificial Sequence
  Description of Artificial Sequence: Synthetic oligonucleotide
aggccugagccuugcuguc

SEQ ID NO: 166399 - RNA, 19 nt, Artificial Sequence
  Description of Artificial Sequence: Synthetic oligonucleotide
cucuaccaccccagccagu

SEQ ID NO: 166400 - RNA, 19 nt, Artificial Sequence
  Description of Artificial Sequence: Synthetic oligonucleotide
uggccgaggagcccuucac

SEQ ID NO: 166401 - RNA, 19 nt, Artificial Sequence
  Description of Artificial Sequence: Synthetic oligonucleotide
ccuucgccauggagcugga

SEQ ID NO: 166402 - RNA, 19 nt, Artificial Sequence
  Description of Artificial Sequence: Synthetic oligonucleotide
augaccuaccuaaggagcg

SEQ ID NO: 166403 - RNA, 19 nt, Artificial Sequence
  Description of Artificial Sequence: Synthetic oligonucleotide
ggcugaaggagcucaucuu

SEQ ID NO: 166404 - RNA, 19 nt, Artificial Sequence
  Description of Artificial Sequence: Synthetic oligonucleotide
uccaggagacagcacgcuu

SEQ ID NO: 166405 - RNA, 19 nt, Artificial Sequence
  Description of Artificial Sequence: Synthetic oligonucleotide
uccagcccggagugcugga

SEQ ID NO: 166406 - RNA, 19 nt, Artificial Sequence
  Description of Artificial Sequence: Synthetic oligonucleotide
aggcccccuagcccagaca

SEQ ID NO: 166407 - RNA, 19 nt, Artificial Sequence
  Description of Artificial Sequence: Synthetic oligonucleotide
agacaucucugcacccugg

SEQ ID NO: 166408 - RNA, 19 nt, Artificial Sequence
  Description of Artificial Sequence: Synthetic oligonucleotide
gggccuggaccugccuccu

SEQ ID NO: 166409 - RNA, 19 nt, Artificial Sequence
  Description of Artificial Sequence: Synthetic oligonucleotide
ugccugccccucucccgcc

SEQ ID NO: 166410 - RNA, 19 nt, Artificial Sequence
  Description of Artificial Sequence: Synthetic oligonucleotide
cagacuguuagaaaaugga

SEQ ID NO: 166411 - RNA, 19 nt, Artificial Sequence
  Description of Artificial Sequence: Synthetic oligonucleotide
acacugugcccagcccgga

SEQ ID NO: 166412 - RNA, 19 nt, Artificial Sequence
  Description of Artificial Sequence: Synthetic oligonucleotide
accuuggcagcccaggccg

SEQ ID NO: 166413 - RNA, 19 nt, Artificial Sequence
  Description of Artificial Sequence: Synthetic oligonucleotide
gggguggagcaugggccug

SEQ ID NO: 166414 - RNA, 19 nt, Artificial Sequence
  Description of Artificial Sequence: Synthetic oligonucleotide
ggccaccucucuccuuugc

SEQ ID NO: 166415 - RNA, 19 nt, Artificial Sequence
  Description of Artificial Sequence: Synthetic oligonucleotide
cugaggccuccagcuucag

SEQ ID NO: 166416 - RNA, 19 nt, Artificial Sequence
  Description of Artificial Sequence: Synthetic oligonucleotide
ggcaggccaaggccuucuc

SEQ ID NO: 166417 - RNA, 19 nt, Artificial Sequence
  Description of Artificial Sequence: Synthetic oligonucleotide
ccuccccacccgcccuccc

SEQ ID NO: 166418 - RNA, 19 nt, Artificial Sequence
  Description of Artificial Sequence: Synthetic oligonucleotide
ccacggggccucgggaccu

SEQ ID NO: 166419 - RNA, 19 nt, Artificial Sequence
  Description of Artificial Sequence: Synthetic oligonucleotide
ucagguggccccaguucaa

SEQ ID NO: 166420 - RNA, 19 nt, Artificial Sequence
  Description of Artificial Sequence: Synthetic oligonucleotide
aucucccgcugcugcugcu

SEQ ID NO: 166421 - RNA, 19 nt, Artificial Sequence
  Description of Artificial Sequence: Synthetic oligonucleotide
ugcgcccuuaccuucccca

SEQ ID NO: 166422 - RNA, 19 nt, Artificial Sequence
  Description of Artificial Sequence: Synthetic oligonucleotide
agcgucccagucucuggca

SEQ ID NO: 166423 - RNA, 19 nt, Artificial Sequence
  Description of Artificial Sequence: Synthetic oligonucleotide
aguucuggaauggaagggu

SEQ ID NO: 166424 - RNA, 19 nt, Artificial Sequence
  Description of Artificial Sequence: Synthetic oligonucleotide
uucuggcugccccaaccug

SEQ ID NO: 166425 - RNA, 19 nt, Artificial Sequence
  Description of Artificial Sequence: Synthetic oligonucleotide
gcugaagggcagaggugga

SEQ ID NO: 166426 - RNA, 19 nt, Artificial Sequence
  Description of Artificial Sequence: Synthetic oligonucleotide
aggguggggggcgcugagu

SEQ ID NO: 166427 - RNA, 19 nt, Artificial Sequence
  Description of Artificial Sequence: Synthetic oligonucleotide
uagggacucagggccaugc

SEQ ID NO: 166428 - RNA, 19 nt, Artificial Sequence
  Description of Artificial Sequence: Synthetic oligonucleotide
ccugccccccucaucucau

SEQ ID NO: 166429 - RNA, 19 nt, Artificial Sequence
  Description of Artificial Sequence: Synthetic oligonucleotide
uucaaaccccacccuaguu

SEQ ID NO: 166430 - RNA, 19 nt, Artificial Sequence
  Description of Artificial Sequence: Synthetic oligonucleotide
uucccugaaggaacauucc

SEQ ID NO: 166431 - RNA, 19 nt, Artificial Sequence
  Description of Artificial Sequence: Synthetic oligonucleotide
cuuagucucaagggcuagc

SEQ ID NO: 166432 - RNA, 19 nt, Artificial Sequence
  Description of Artificial Sequence: Synthetic oligonucleotide
caucccugaggagccaggc

SEQ ID NO: 166433 - RNA, 19 nt, Artificial Sequence
  Description of Artificial Sequence: Synthetic oligonucleotide
ccgggccgaauccccuccc

SEQ ID NO: 166434 - RNA, 19 nt, Artificial Sequence
  Description of Artificial Sequence: Synthetic oligonucleotide
cugucaaagcugucacuuc

SEQ ID NO: 166435 - RNA, 19 nt, Artificial Sequence
  Description of Artificial Sequence: Synthetic oligonucleotide
cgcgugcccucgcugcuuc

SEQ ID NO: 166436 - RNA, 19 nt, Artificial Sequence
  Description of Artificial Sequence: Synthetic oligonucleotide
cuguguguggugagcagaa

SEQ ID NO: 166437 - RNA, 19 nt, Artificial Sequence
  Description of Artificial Sequence: Synthetic oligonucleotide
aguggagcuggggggcgug

SEQ ID NO: 166438 - RNA, 19 nt, Artificial Sequence
  Description of Artificial Sequence: Synthetic oligonucleotide
ggagagcccggcgccccug

SEQ ID NO: 166439 - RNA, 19 nt, Artificial Sequence
  Description of Artificial Sequence: Synthetic oligonucleotide
gccaccucccugacccguc

SEQ ID NO: 166440 - RNA, 19 nt, Artificial Sequence
  Description of Artificial Sequence: Synthetic oligonucleotide
cuaauauauaaauauagag

SEQ ID NO: 166441 - RNA, 19 nt, Artificial Sequence
  Description of Artificial Sequence: Synthetic oligonucleotide
gaugugucuauggcugaaa

SEQ ID NO: 166442 - RNA, 25 nt, Artificial Sequence
  Description of Artificial Sequence: Synthetic oligonucleotide
cuggcgcgcgcggcccugcggguga

SEQ ID NO: 166443 - RNA, 25 nt, Artificial Sequence
  Description of Artificial Sequence: Synthetic oligonucleotide
acaggcaggcgggaaggggcggggc

SEQ ID NO: 166444 - RNA, 25 nt, Artificial Sequence
  Description of Artificial Sequence: Synthetic oligonucleotide
ccucgggcggggccgccguggggag

SEQ ID NO: 166445 - RNA, 25 nt, Artificial Sequence
  Description of Artificial Sequence: Synthetic oligonucleotide
ggagggcggugggaggggaggagug

SEQ ID NO: 166446 - RNA, 25 nt, Artificial Sequence
  Description of Artificial Sequence: Synthetic oligonucleotide
ggagauggcggcggcggcggcucag

SEQ ID NO: 166447 - RNA, 25 nt, Artificial Sequence
  Description of Artificial Sequence: Synthetic oligonucleotide
ggggggcgggggcggggagccccgu

SEQ ID NO: 166448 - RNA, 25 nt, Artificial Sequence
  Description of Artificial Sequence: Synthetic oligonucleotide
uagaaccgagggggucggcccgggg

SEQ ID NO: 166449 - RNA, 25 nt, Artificial Sequence
  Description of Artificial Sequence: Synthetic oligonucleotide
ggucccgggggagguggagauggug

SEQ ID NO: 166450 - RNA, 25 nt, Artificial Sequence
  Description of Artificial Sequence: Synthetic oligonucleotide
gaaggggcagccguucgacgugggc

SEQ ID NO: 166451 - RNA, 25 nt, Artificial Sequence
  Description of Artificial Sequence: Synthetic oligonucleotide
cccgcgcuacacgcaguugcaguac

SEQ ID NO: 166452 - RNA, 25 nt, Artificial Sequence
  Description of Artificial Sequence: Synthetic oligonucleotide
caucggcgagggcgcguacggcaug

SEQ ID NO: 166453 - RNA, 25 nt, Artificial Sequence
  Description of Artificial Sequence: Synthetic oligonucleotide
ggucagcucggccuaugaccacgug

SEQ ID NO: 166454 - RNA, 25 nt, Artificial Sequence
  Description of Artificial Sequence: Synthetic oligonucleotide
gcgcaagacucgcguggccaucaag

SEQ ID NO: 166455 - RNA, 25 nt, Artificial Sequence
  Description of Artificial Sequence: Synthetic oligonucleotide
gaagaucagccccuucgaacaucag

SEQ ID NO: 166456 - RNA, 25 nt, Artificial Sequence
  Description of Artificial Sequence: Synthetic oligonucleotide
gaccuacugccagcgcacgcuccgg

SEQ ID NO: 166457 - RNA, 25 nt, Artificial Sequence
  Description of Artificial Sequence: Synthetic oligonucleotide
ggagauccagauccugcugcgcuuc

SEQ ID NO: 166458 - RNA, 25 nt, Artificial Sequence
  Description of Artificial Sequence: Synthetic oligonucleotide
ccgccaugagaaugucaucggcauc

SEQ ID NO: 166459 - RNA, 25 nt, Artificial Sequence
  Description of Artificial Sequence: Synthetic oligonucleotide
ccgagacauucugcgggcguccacc

SEQ ID NO: 166460 - RNA, 25 nt, Artificial Sequence
  Description of Artificial Sequence: Synthetic oligonucleotide
ccuggaagccaugagagaugucuac

SEQ ID NO: 166461 - RNA, 25 nt, Artificial Sequence
  Description of Artificial Sequence: Synthetic oligonucleotide
cauugugcaggaccugauggagacu

SEQ ID NO: 166462 - RNA, 25 nt, Artificial Sequence
  Description of Artificial Sequence: Synthetic oligonucleotide
ugaccuguacaaguugcugaaaagc

SEQ ID NO: 166463 - RNA, 25 nt, Artificial Sequence
  Description of Artificial Sequence: Synthetic oligonucleotide
ccagcagcugagcaaugaccauauc

SEQ ID NO: 166464 - RNA, 25 nt, Artificial Sequence
  Description of Artificial Sequence: Synthetic oligonucleotide
cugcuacuuccucuaccagauccug

SEQ ID NO: 166465 - RNA, 25 nt, Artificial Sequence
  Description of Artificial Sequence: Synthetic oligonucleotide
gcggggccucaaguacauccacucc

SEQ ID NO: 166466 - RNA, 25 nt, Artificial Sequence
  Description of Artificial Sequence: Synthetic oligonucleotide
cgccaacgugcuccaccgagaucua

SEQ ID NO: 166467 - RNA, 25 nt, Artificial Sequence
  Description of Artificial Sequence: Synthetic oligonucleotide
aaagcccuccaaccugcucaucaac

SEQ ID NO: 166468 - RNA, 25 nt, Artificial Sequence
  Description of Artificial Sequence: Synthetic oligonucleotide
caccaccugcgaccuuaagauuugu

SEQ ID NO: 166469 - RNA, 25 nt, Artificial Sequence
  Description of Artificial Sequence: Synthetic oligonucleotide
ugauuucggccuggcccggauugcc

SEQ ID NO: 166470 - RNA, 25 nt, Artificial Sequence
  Description of Artificial Sequence: Synthetic oligonucleotide
cgauccugagcaugaccacaccggc

SEQ ID NO: 166471 - RNA, 25 nt, Artificial Sequence
  Description of Artificial Sequence: Synthetic oligonucleotide
cuuccugacggaguauguggcuacg

SEQ ID NO: 166472 - RNA, 25 nt, Artificial Sequence
  Description of Artificial Sequence: Synthetic oligonucleotide
gcgcugguaccgggccccagagauc

SEQ ID NO: 166473 - RNA, 25 nt, Artificial Sequence
  Description of Artificial Sequence: Synthetic oligonucleotide
caugcugaacuccaagggcuauacc

SEQ ID NO: 166474 - RNA, 25 nt, Artificial Sequence
  Description of Artificial Sequence: Synthetic oligonucleotide
caaguccaucgacaucuggucugug

SEQ ID NO: 166475 - RNA, 25 nt, Artificial Sequence
  Description of Artificial Sequence: Synthetic oligonucleotide
gggcugcauucuggcugagaugcuc

SEQ ID NO: 166476 - RNA, 25 nt, Artificial Sequence
  Description of Artificial Sequence: Synthetic oligonucleotide
cucuaaccggcccaucuucccuggc

SEQ ID NO: 166477 - RNA, 25 nt, Artificial Sequence
  Description of Artificial Sequence: Synthetic oligonucleotide
caagcacuaccuggaucagcucaac

SEQ ID NO: 166478 - RNA, 25 nt, Artificial Sequence
  Description of Artificial Sequence: Synthetic oligonucleotide
ccacauucugggcauccugggcucc

SEQ ID NO: 166479 - RNA, 25 nt, Artificial Sequence
  Description of Artificial Sequence: Synthetic oligonucleotide
cccaucccaggaggaccugaauugu

SEQ ID NO: 166480 - RNA, 25 nt, Artificial Sequence
  Description of Artificial Sequence: Synthetic oligonucleotide
uaucaucaacaugaaggcccgaaac

SEQ ID NO: 166481 - RNA, 25 nt, Artificial Sequence
  Description of Artificial Sequence: Synthetic oligonucleotide
cuaccuacagucucugcccuccaag

SEQ ID NO: 166482 - RNA, 25 nt, Artificial Sequence
  Description of Artificial Sequence: Synthetic oligonucleotide
gaccaagguggcuugggccaagcuu

SEQ ID NO: 166483 - RNA, 25 nt, Artificial Sequence
  Description of Artificial Sequence: Synthetic oligonucleotide
uuuccccaagucagacuccaaagcc

SEQ ID NO: 166484 - RNA, 25 nt, Artificial Sequence
  Description of Artificial Sequence: Synthetic oligonucleotide
ccuugaccugcuggaccggauguua

SEQ ID NO: 166485 - RNA, 25 nt, Artificial Sequence
  Description of Artificial Sequence: Synthetic oligonucleotide
aaccuuuaaccccaauaaacggauc

SEQ ID NO: 166486 - RNA, 25 nt, Artificial Sequence
  Description of Artificial Sequence: Synthetic oligonucleotide
cacaguggaggaagcgcuggcucac

SEQ ID NO: 166487 - RNA, 25 nt, Artificial Sequence
  Description of Artificial Sequence: Synthetic oligonucleotide
ccccuaccuggagcaguacuaugac

SEQ ID NO: 166488 - RNA, 25 nt, Artificial Sequence
  Description of Artificial Sequence: Synthetic oligonucleotide
cccgacggaugagccaguggccgag

SEQ ID NO: 166489 - RNA, 25 nt, Artificial Sequence
  Description of Artificial Sequence: Synthetic oligonucleotide
ggagcccuucaccuucgccauggag

SEQ ID NO: 166490 - RNA, 25 nt, Artificial Sequence
  Description of Artificial Sequence: Synthetic oligonucleotide
gcuggaugaccuaccuaaggagcgg

SEQ ID NO: 166491 - RNA, 25 nt, Artificial Sequence
  Description of Artificial Sequence: Synthetic oligonucleotide
gcugaaggagcucaucuuccaggag

SEQ ID NO: 166492 - RNA, 25 nt, Artificial Sequence
  Description of Artificial Sequence: Synthetic oligonucleotide
gacagcacgcuuccagcccggagug

SEQ ID NO: 166493 - RNA, 25 nt, Artificial Sequence
  Description of Artificial Sequence: Synthetic oligonucleotide
gcuggaggcccccuagcccagacag

SEQ ID NO: 166494 - RNA, 25 nt, Artificial Sequence
  Description of Artificial Sequence: Synthetic oligonucleotide
gacaucucugcacccuggggccugg

SEQ ID NO: 166495 - RNA, 25 nt, Artificial Sequence
  Description of Artificial Sequence: Synthetic oligonucleotide
gaccugccuccugccugccccucuc

SEQ ID NO: 166496 - RNA, 25 nt, Artificial Sequence
  Description of Artificial Sequence: Synthetic oligonucleotide
cccgccagacuguuagaaaauggac

SEQ ID NO: 166497 - RNA, 25 nt, Artificial Sequence
  Description of Artificial Sequence: Synthetic oligonucleotide
cacugugcccagcccggaccuuggc

SEQ ID NO: 166498 - RNA, 25 nt, Artificial Sequence
  Description of Artificial Sequence: Synthetic oligonucleotide
cagcccaggccgggguggagcaugg

SEQ ID NO: 166499 - RNA, 25 nt, Artificial Sequence
  Description of Artificial Sequence: Synthetic oligonucleotide
ggccuggccaccucucuccuuugcu

SEQ ID NO: 166500 - RNA, 25 nt, Artificial Sequence
  Description of Artificial Sequence: Synthetic oligonucleotide
ugaggccuccagcuucaggcaggcc

SEQ ID NO: 166501 - RNA, 25 nt, Artificial Sequence
  Description of Artificial Sequence: Synthetic oligonucleotide
caaggccuucuccuccccacccgcc

SEQ ID NO: 166502 - RNA, 25 nt, Artificial Sequence
  Description of Artificial Sequence: Synthetic oligonucleotide
ccuccccacggggccucgggaccuc

SEQ ID NO: 166503 - RNA, 25 nt, Artificial Sequence
  Description of Artificial Sequence: Synthetic oligonucleotide
cagguggccccaguucaaucucccg

SEQ ID NO: 166504 - RNA, 25 nt, Artificial Sequence
  Description of Artificial Sequence: Synthetic oligonucleotide
gcugcugcugcugcgcccuuaccuu

SEQ ID NO: 166505 - RNA, 25 nt, Artificial Sequence
  Description of Artificial Sequence: Synthetic oligonucleotide
uccccagcgucccagucucuggcag

SEQ ID NO: 166506 - RNA, 25 nt, Artificial Sequence
  Description of Artificial Sequence: Synthetic oligonucleotide
guucuggaauggaaggguucuggcu

SEQ ID NO: 166507 - RNA, 25 nt, Artificial Sequence
  Description of Artificial Sequence: Synthetic oligonucleotide
ugccccaaccugcugaagggcagag

SEQ ID NO: 166508 - RNA, 25 nt, Artificial Sequence
  Description of Artificial Sequence: Synthetic oligonucleotide
gguggaggguggggggcgcugagua

SEQ ID NO: 166509 - RNA, 25 nt, Artificial Sequence
  Description of Artificial Sequence: Synthetic oligonucleotide
agggacucagggccaugccugcccc

SEQ ID NO: 166510 - RNA, 25 nt, Artificial Sequence
  Description of Artificial Sequence: Synthetic oligonucleotide
cccucaucucauucaaaccccaccc

SEQ ID NO: 166511 - RNA, 25 nt, Artificial Sequence
  Description of Artificial Sequence: Synthetic oligonucleotide
cuaguuucccugaaggaacauuccu

SEQ ID NO: 166512 - RNA, 25 nt, Artificial Sequence
  Description of Artificial Sequence: Synthetic oligonucleotide
uuagucucaagggcuagcaucccug

SEQ ID NO: 166513 - RNA, 25 nt, Artificial Sequence
  Description of Artificial Sequence: Synthetic oligonucleotide
gaggagccaggccgggccgaauccc

SEQ ID NO: 166514 - RNA, 25 nt, Artificial Sequence
  Description of Artificial Sequence: Synthetic oligonucleotide
ccucccugucaaagcugucacuucg

SEQ ID NO: 166515 - RNA, 25 nt, Artificial Sequence
  Description of Artificial Sequence: Synthetic oligonucleotide
gcgugcccucgcugcuucugugugu

SEQ ID NO: 166516 - RNA, 25 nt, Artificial Sequence
  Description of Artificial Sequence: Synthetic oligonucleotide
uggugagcagaaguggagcuggggg

SEQ ID NO: 166517 - RNA, 25 nt, Artificial Sequence
  Description of Artificial Sequence: Synthetic oligonucleotide
ggcguggagagcccggcgccccugc

SEQ ID NO: 166518 - RNA, 25 nt, Artificial Sequence
  Description of Artificial Sequence: Synthetic oligonucleotide
ccaccucccugacccgucuaauaua

SEQ ID NO: 166519 - RNA, 25 nt, Artificial Sequence
  Description of Artificial Sequence: Synthetic oligonucleotide
auaaauauagagaugugucuauggc

SEQ ID NO: 166520 - RNA, 25 nt, Artificial Sequence
  Description of Artificial Sequence: Synthetic oligonucleotide
ccacauucuggcccuugaccugcug

SEQ ID NO: 166521 - RNA, 25 nt, Artificial Sequence
  Description of Artificial Sequence: Synthetic oligonucleotide
ggaccggauguuaaccuuuaacccc

SEQ ID NO: 166522 - RNA, 25 nt, Artificial Sequence
  Description of Artificial Sequence: Synthetic oligonucleotide
caauaaacggaucacaguggaggaa

SEQ ID NO: 166523 - RNA, 25 nt, Artificial Sequence
  Description of Artificial Sequence: Synthetic oligonucleotide
agcgcuggcucaccccuaccuggag

SEQ ID NO: 166524 - RNA, 25 nt, Artificial Sequence
  Description of Artificial Sequence: Synthetic oligonucleotide
gcaguacuaugacccgacggaugag

SEQ ID NO: 166525 - RNA, 25 nt, Artificial Sequence
  Description of Artificial Sequence: Synthetic oligonucleotide
gccaguggccgaggagcccuucacc

SEQ ID NO: 166526 - RNA, 25 nt, Artificial Sequence
  Description of Artificial Sequence: Synthetic oligonucleotide
cuucgccauggagcuggaugaccua

SEQ ID NO: 166527 - RNA, 25 nt, Artificial Sequence
  Description of Artificial Sequence: Synthetic oligonucleotide
accuaaggagcggcugaaggagcuc

SEQ ID NO: 166528 - RNA, 25 nt, Artificial Sequence
  Description of Artificial Sequence: Synthetic oligonucleotide
caucuuccaggagacagcacgcuuc

SEQ ID NO: 166529 - RNA, 25 nt, Artificial Sequence
  Description of Artificial Sequence: Synthetic oligonucleotide
ccagcccggagugcuggaggccccc

SEQ ID NO: 166530 - RNA, 25 nt, Artificial Sequence
  Description of Artificial Sequence: Synthetic oligonucleotide
cuagcccagacagacaucucugcac

SEQ ID NO: 166531 - RNA, 25 nt, Artificial Sequence
  Description of Artificial Sequence: Synthetic oligonucleotide
cccuggggccuggaccugccuccug

SEQ ID NO: 166532 - RNA, 25 nt, Artificial Sequence
  Description of Artificial Sequence: Synthetic oligonucleotide
gccugccccucucccgccagacugu

SEQ ID NO: 166533 - RNA, 25 nt, Artificial Sequence
  Description of Artificial Sequence: Synthetic oligonucleotide
uuagaaaauggacacugugcccagc

SEQ ID NO: 166534 - RNA, 25 nt, Artificial Sequence
  Description of Artificial Sequence: Synthetic oligonucleotide
cccggaccuuggcagcccaggccgg

SEQ ID NO: 166535 - RNA, 25 nt, Artificial Sequence
  Description of Artificial Sequence: Synthetic oligonucleotide
ggguggagcaugggccuggccaccu

SEQ ID NO: 166536 - RNA, 25 nt, Artificial Sequence
  Description of Artificial Sequence: Synthetic oligonucleotide
ucucuccuuugcugaggccuccagc

SEQ ID NO: 166537 - RNA, 25 nt, Artificial Sequence
  Description of Artificial Sequence: Synthetic oligonucleotide
cuucaggcaggccaaggccuucucc

SEQ ID NO: 166538 - RNA, 25 nt, Artificial Sequence
  Description of Artificial Sequence: Synthetic oligonucleotide
cuccccacccgcccuccccacgggg

SEQ ID NO: 166539 - RNA, 25 nt, Artificial Sequence
  Description of Artificial Sequence: Synthetic oligonucleotide
gccucgggaccucagguggccccag

SEQ ID NO: 166540 - RNA, 25 nt, Artificial Sequence
  Description of Artificial Sequence: Synthetic oligonucleotide
guucaaucucccgcugcugcugcug

SEQ ID NO: 166541 - RNA, 25 nt, Artificial Sequence
  Description of Artificial Sequence: Synthetic oligonucleotide
gcgcccuuaccuuccccagcguccc

SEQ ID NO: 166542 - RNA, 25 nt, Artificial Sequence
  Description of Artificial Sequence: Synthetic oligonucleotide
cagucucuggcaguucuggaaugga

SEQ ID NO: 166543 - RNA, 25 nt, Artificial Sequence
  Description of Artificial Sequence: Synthetic oligonucleotide
aaggguucuggcugccccaaccugc

SEQ ID NO: 166544 - RNA, 25 nt, Artificial Sequence
  Description of Artificial Sequence: Synthetic oligonucleotide
cugaagggcagagguggaggguggg

SEQ ID NO: 166545 - RNA, 25 nt, Artificial Sequence
  Description of Artificial Sequence: Synthetic oligonucleotide
ggggcgcugaguagggacucagggc

SEQ ID NO: 166546 - RNA, 25 nt, Artificial Sequence
  Description of Artificial Sequence: Synthetic oligonucleotide
ccaugccugccccccucaucucauu

SEQ ID NO: 166547 - RNA, 25 nt, Artificial Sequence
  Description of Artificial Sequence: Synthetic oligonucleotide
ucaaaccccacccuaguuucccuga

SEQ ID NO: 166548 - RNA, 25 nt, Artificial Sequence
  Description of Artificial Sequence: Synthetic oligonucleotide
aaggaacauuccuuagucucaaggg

SEQ ID NO: 166549 - RNA, 25 nt, Artificial Sequence
  Description of Artificial Sequence: Synthetic oligonucleotide
gcuagcaucccugaggagccaggcc

SEQ ID NO: 166550 - RNA, 25 nt, Artificial Sequence
  Description of Artificial Sequence: Synthetic oligonucleotide
cgggccgaauccccucccugucaaa

SEQ ID NO: 166551 - RNA, 25 nt, Artificial Sequence
  Description of Artificial Sequence: Synthetic oligonucleotide
agcugucacuucgcgugcccucgcu

SEQ ID NO: 166552 - RNA, 25 nt, Artificial Sequence
  Description of Artificial Sequence: Synthetic oligonucleotide
ugcuucuguguguggugagcagaag

SEQ ID NO: 166553 - RNA, 25 nt, Artificial Sequence
  Description of Artificial Sequence: Synthetic oligonucleotide
guggagcuggggggcguggagagcc

SEQ ID NO: 166554 - RNA, 25 nt, Artificial Sequence
  Description of Artificial Sequence: Synthetic oligonucleotide
ccggcgccccugccaccucccugac

SEQ ID NO: 166555 - RNA, 25 nt, Artificial Sequence
  Description of Artificial Sequence: Synthetic oligonucleotide
cccgucuaauauauaaauauagaga

SEQ ID NO: 166556 - RNA, 25 nt, Artificial Sequence
  Description of Artificial Sequence: Synthetic oligonucleotide
cccgacggaugaggugggccagucc

SEQ ID NO: 166557 - RNA, 25 nt, Artificial Sequence
  Description of Artificial Sequence: Synthetic oligonucleotide
cccagcagcaguggggcugggggca

SEQ ID NO: 166558 - RNA, 25 nt, Artificial Sequence
  Description of Artificial Sequence: Synthetic oligonucleotide
aggggagcaggggggcacguaggca

SEQ ID NO: 166559 - RNA, 25 nt, Artificial Sequence
  Description of Artificial Sequence: Synthetic oligonucleotide
aucccccaugccaggccugagccuu

SEQ ID NO: 166560 - RNA, 25 nt, Artificial Sequence
  Description of Artificial Sequence: Synthetic oligonucleotide
ugcugucucuaccaccccagccagu

SEQ ID NO: 166561 - RNA, 25 nt, Artificial Sequence
  Description of Artificial Sequence: Synthetic oligonucleotide
uggccgaggagcccuucaccuucgc

SEQ ID NO: 166562 - RNA, 25 nt, Artificial Sequence
  Description of Artificial Sequence: Synthetic oligonucleotide
ccauggagcuggaugaccuaccuaa

SEQ ID NO: 166563 - RNA, 25 nt, Artificial Sequence
  Description of Artificial Sequence: Synthetic oligonucleotide
aggagcggcugaaggagcucaucuu

SEQ ID NO: 166564 - RNA, 25 nt, Artificial Sequence
  Description of Artificial Sequence: Synthetic oligonucleotide
uccaggagacagcacgcuuccagcc

SEQ ID NO: 166565 - RNA, 25 nt, Artificial Sequence
  Description of Artificial Sequence: Synthetic oligonucleotide
ccggagugcuggaggcccccuagcc

SEQ ID NO: 166566 - RNA, 25 nt, Artificial Sequence
  Description of Artificial Sequence: Synthetic oligonucleotide
ccagacagacaucucugcacccugg

SEQ ID NO: 166567 - RNA, 25 nt, Artificial Sequence
  Description of Artificial Sequence: Synthetic oligonucleotide
gggccuggaccugccuccugccugc

SEQ ID NO: 166568 - RNA, 25 nt, Artificial Sequence
  Description of Artificial Sequence: Synthetic oligonucleotide
ccccucucccgccagacuguuagaa

SEQ ID NO: 166569 - RNA, 25 nt, Artificial Sequence
  Description of Artificial Sequence: Synthetic oligonucleotide
aaauggacacugugcccagcccgga

SEQ ID NO: 166570 - RNA, 25 nt, Artificial Sequence
  Description of Artificial Sequence: Synthetic oligonucleotide
accuuggcagcccaggccggggugg

SEQ ID NO: 166571 - RNA, 25 nt, Artificial Sequence
  Description of Artificial Sequence: Synthetic oligonucleotide
gagcaugggccuggccaccucucuc

SEQ ID NO: 166572 - RNA, 25 nt, Artificial Sequence
  Description of Artificial Sequence: Synthetic oligonucleotide
ccuuugcugaggccuccagcuucag

SEQ ID NO: 166573 - RNA, 25 nt, Artificial Sequence
  Description of Artificial Sequence: Synthetic oligonucleotide
ggcaggccaaggccuucuccucccc

SEQ ID NO: 166574 - RNA, 25 nt, Artificial Sequence
  Description of Artificial Sequence: Synthetic oligonucleotide
cacccgcccuccccacggggccucg

SEQ ID NO: 166575 - RNA, 25 nt, Artificial Sequence
  Description of Artificial Sequence: Synthetic oligonucleotide
gggaccucagguggccccaguucaa

SEQ ID NO: 166576 - RNA, 25 nt, Artificial Sequence
  Description of Artificial Sequence: Synthetic oligonucleotide
aucucccgcugcugcugcugcgccc

SEQ ID NO: 166577 - RNA, 25 nt, Artificial Sequence
  Description of Artificial Sequence: Synthetic oligonucleotide
cuuaccuuccccagcgucccagucu

SEQ ID NO: 166578 - RNA, 25 nt, Artificial Sequence
  Description of Artificial Sequence: Synthetic oligonucleotide
ucuggcaguucuggaauggaagggu

SEQ ID NO: 166579 - RNA, 25 nt, Artificial Sequence
  Description of Artificial Sequence: Synthetic oligonucleotide
uucuggcugccccaaccugcugaag

SEQ ID NO: 166580 - RNA, 25 nt, Artificial Sequence
  Description of Artificial Sequence: Synthetic oligonucleotide
gggcagagguggaggguggggggcg

SEQ ID NO: 166581 - RNA, 25 nt, Artificial Sequence
  Description of Artificial Sequence: Synthetic oligonucleotide
gcugaguagggacucagggccaugc

SEQ ID NO: 166582 - RNA, 25 nt, Artificial Sequence
  Description of Artificial Sequence: Synthetic oligonucleotide
ccugccccccucaucucauucaaac

SEQ ID NO: 166583 - RNA, 25 nt, Artificial Sequence
  Description of Artificial Sequence: Synthetic oligonucleotide
ccccacccuaguuucccugaaggaa

SEQ ID NO: 166584 - RNA, 25 nt, Artificial Sequence
  Description of Artificial Sequence: Synthetic oligonucleotide
acauuccuuagucucaagggcuagc

SEQ ID NO: 166585 - RNA, 25 nt, Artificial Sequence
  Description of Artificial Sequence: Synthetic oligonucleotide
caucccugaggagccaggccgggcc

SEQ ID NO: 166586 - RNA, 25 nt, Artificial Sequence
  Description of Artificial Sequence: Synthetic oligonucleotide
cgaauccccucccugucaaagcugu

SEQ ID NO: 166587 - RNA, 25 nt, Artificial Sequence
  Description of Artificial Sequence: Synthetic oligonucleotide
ucacuucgcgugcccucgcugcuuc

SEQ ID NO: 166588 - RNA, 25 nt, Artificial Sequence
  Description of Artificial Sequence: Synthetic oligonucleotide
cuguguguggugagcagaaguggag

SEQ ID NO: 166589 - RNA, 25 nt, Artificial Sequence
  Description of Artificial Sequence: Synthetic oligonucleotide
gcuggggggcguggagagcccggcg

SEQ ID NO: 166590 - RNA, 25 nt, Artificial Sequence
  Description of Artificial Sequence: Synthetic oligonucleotide
gccccugccaccucccugacccguc

SEQ ID NO: 166591 - RNA, 25 nt, Artificial Sequence
  Description of Artificial Sequence: Synthetic oligonucleotide
cuaauauauaaauauagagaugugu
